United States Patent Application Publication US 2020/0329713 A1 - sequence listing, part 7

SEQ ID NO: 2 - DNA, 6618583 bp, Bacillus thuringiensis (residues 4,963,939-6,618,583 of 6,618,583)
ttaaaaacgaaaatacatttacgataaataaaaccgccactgaaattattgagttaattgatggtactaaaacatatggacaagttgtatctttcttgtctttaaaatacagtgaagatccaataagtattgaaaagaaattaaatgcatttttaaataatgtatccaaagtttacaatatgaacattggtacgcaagaagaacctataaatgtaccagttaatttaattgaagaacagactatatatccaaaagtggcttcaattgaaatcacaaacagatgtaatgtaagatgtcgtcattgctatggagattttggagcagtaaagccaaaagtaatgagcttagatcaaataaaatccttattagatgacttaaataatataggagtgaaattaattgaacttacgggcggtgatataacagtacatccaaatctaaaagagatattgttatatgcacttaacttggatttttctcaaataacactgttgaccaatggtatagctctttctgagaaagttatggacataataataaaaaataagtcgaaaacatttgtgcaaattgatatgcatagcttagatgataattatttgacttggttctttaaagttcctaatacacttcataaaattaaaaataacataatgaaattagccgaaaatgatgttcgtttgcggatcgccacaatagttacacatttgaatgtgcacgaggtagaagatatagctgaatgggtacataatttagggattgatagtattggggtatctccagtaataccaatgggaagagccttaggatgtagtgatctttatttaaatgaagaggatgttaaaacatatggtgaagcattgttgaaaataaataaaaaatatcctaaatttgtttcattatatgaaggtgcgcgcgctgagattaggaattgtggtgcaataacatcacatattgtgattgcgcctgatggtgaaattaaaatgtgtactatgcatagtttagatgatttgaaaaacagtataggtaatgtttttgaacagaatattaaagatatttatgacgaaaaattcaaatacattaatgcattttttaacttgcaagcacctcaaatggactctgaggaatgtaaagagtgtgaaaataaacgtttttgtagtacatgcttcttaagaagctttataaaagcacaagaaattggcgataaatgtaaatggtttaaaaatcatgtccctgaaataattaaggagccattaatggtagggcaaaattagtatgattggatgagatgaatattgttaagtttctgaggataaaccaatataattccatagacaatgcgtcgggataaggtctcaagatatctatggaattatataaacctcattatattgattcgtaaattaatataataaatagacaaaggaggagaaagagggtgaataagaagataaataaacaagatgaaattcaaatttcttataaagagttattatttttatatccgtatttgaaaaatacaaaaactttgttagctcttggtttaattgggatggttatagcttctttgattatcgcaccgataccatatattattggctacattattgataaagttatactattaaacaaaagctacgatcaattattaaaaacaactcttatactcttattaatttattgtattaactatttaatatcgataggttatgagtatttatttactcgtgtacaacaaaatgtagttaatgaaattcgattatctatgataagtaatattatagatgcgcctctttcttatattaatcagaaggagaaaggttacattcttagcagaattgctgaatctggtaatgtaagtgcattattttctccaaatttattaagggttttttcaggtatattcgattttttctttgctttatttataatgtttaatttaagtgttaaacttacaggtatcatagtaattattatcccaatatattttataatatccaaacattcttctaaaatgatatcaaaaagtaccacaaacgtatacgagtcatcggcagtattaaacgcagaaatgtatgaaaccttaaatggaatagaggatataaaattattaaacggtaaaaatatacaaaccaataagattaagagtaaattaaataatgtaattaaaagtgcgctaaaacaaagtttacattttattttctttatgcaaaatttaatagtaacaaataactttgttacagtaatagtattactggtatcaggtattttaattttacaaaaccagcttactataggggtgtatacttcattttcaatttatatggctaaactccttgcgactacccaagctttaggcagcttagatataactctaaaacccgtgtgtattagtattaagagaattaaggagttcttcaatttagatgttgaaaatacactaggtacaaatataatgaaagaaccaattaattcaatagaatttaaagatgtttgttttaaatataatggaaatagtgatttgatatttgatcatttaaacgtgcaaattgaaaagggtgacaagttattaattgatggtataaatggatcaggaaaatctacctttataaaattattaacaggtttatatcaacctgaaagtggaaagatattgataaataatattgactataacttaatacataaagaaagtgttagagatagaataggtatagtttcacaaaatatatttttgtttaaaggaactatattagataacatattatatggacaaacaaataaaacgaaagaagatgtagttaagttaatgaaaaggtatcatttaacatcacatctcaacagatttgagaatggattagatactataattgtacaagatggttccagtgtttcaggaggtcaagcacaatttatagcctttttaagggctatcctcacaaaaagggatataataatattagatgaagcagcatctaatttacatattgatacaagaaatcttatgtatgagatacttcaaaattacaatctttgtaatatattaattatgatttcacatcagcaagatggcttgtattttctcaataaaacattagaacttacacatggtaataaaagaattgctttaaatggtagtatgctttaatcatcatgctttcatagaagggagcatcctaattatgtcaaaaatgaaacttattaattttgatacatatagaaattcaatagttttatttgagaacaatggcgagattatatcagtgtcagctcattttcaattttttgaaggaagtgaaagctatattcaaggttttattgataatgaagaagttattcactttaaatctaataatcctggtccgaatatttctatatatcgatttgcgcctaagaatattaccaaattaattatatcaagtgaaaatagaacacatggaatggtcacattgtatacttcagaaatatagctaacatctaaattttttaatagttaatacgatgaagtcttggattaagatcgcttgtataacattatttgtttttaaatagcagctatataatcaaaaaaaaggaatcctttattataaggtattcttttttttgattataatattaaatttattatagggtttctttacccatcggcatttaactaaagcgaaattgtaaacctaaaataaaataactttatcctttcctataattctacagaaagaaaagtgtattttttgcaaaatgcatgtgatgtcacgaataattaaaaggttattcaataaaaagcttactgccgcatttaaacttattgaaagtaactaatttagttatatatcaatcaaccacgtccagcttggaaagatggatatagcgacataccaccatcagcaaacagtgtaatacctgttacatagctcgcttgtgaagaagcaagccatgctgctaccgctgcaatttctttcggttctccgatatatcccataggaaccatactttcaacatcggcacgtttttctggatccgcaaatttttcagcattaatcggcgtattcatagcaccaggcccaatattatttacacggattccttttggtgcatattctagtgctaatgtttctgtcattagcttaacgccacctttacttgctgcatagtgtacaaataatggccatggaatttgctcgtgaacgcttgacatattaataacactacctttaatatcatgctcaacaaaatatttaattgcttcccggctccctaagaaagcccctgttaaattcgtagcaattaccttattccaatcacttaatggcatttcatgtgaaggtactgaattttcaatacccgcattattaatcatgacatccagtgtaccaaattcttccacagcagatttaacgagattgataacatctgattcaactgttacatctccttttaccgcaatcgcttctccacctgcttgtttaactacttgtactacctcatttgcttctgattcgtttgaataataattaattacaactttggcttgttcttctccaaaacgaattgccatcgctcttcctaatcctgtggatgcacctgtaataacaacaactttcccttttaaatctgtatacataattttttcctcctttttatcctttagcaattcctaacataatgccagctgcaataatgaagataattccaatgacaatcgcaataaattgtcgttttgttttcttttcacctaatataaaaattccacctaaagttgagatcacgatccccatttgggaaagggaaaaacttgttgccacccctacacgcggctgggaaataaataaaaacatatttcctgctgcccaaattaaaccaggaataatattgtgaatcgcatatttattaaatggttgatgcttaaaggttagtagaattccacctaacaccataccaatggcttgtggtaataacgctgaccatccgtctataccgaataggcggataattaccacatatactaagtaaccaagagttgaaattaataacatcacaatcccttttttgaaatttcctttttgttcatcgtttttctcctctttgctttggagggatgtgagaacgattccgattatgatacaaagaagtgccagaacacctaatacaacagatgttgttgttgaccattcatgaaatacaatgaccccaaataaagtagtcgaaactaattgcatccctgttgaaataggcattgttttagaaaccccaattaaatcaatacttttcaattgattggcttgtcctaatgcccaaaataggccagatataatcccgataattatcaccacgggcgtcaaaacgggttttataaaaatataaacaccgatagaaaaaactagagcgccaagggtagttccaagtatttgactgtaaggaccgcctcctagtttaacgttgaagagtacaatacttccccaaaataaggctggtaaaatcgctaataaaatatccatttttctaaccttcctaaaacatatttattaagttgaatgcttgtacgagatagtatctttgtgtcgagggaattattttagaataagagaagtttttctacccgtaatatttgtttacccaaaataaaagataaataacatcatgttgaaaaagaaaataactagcacgaaataaaaaaggttattagaaagaatatgaccaatacaatttcaagttttgaaaataggaataatggagaaaaacttgatgcaaaattaaggtatgttatacaaaaacaacgcattatgtttatacatgagaaaaagaaataatatcgtaaaatctttaatttcatatataaatttaataagaagtatgatatgatgaaagtaacaaaatacatctaaaactatcttgcaaaaggacacacctacgcatacatatgcgataggtgtgtccttttttatttgtttttaagatttcaagactgaaaagggggatgtatattgtgtaccagtaatatagcatctactaatgtttcttttgaaaaattgaaaagtcaggaagagaatgaaaaaaacatagtgtcaatatgcccgaattgtaagaaacgctcatttagagtactttataatgattatccaaaatggatacagtattgcctatgttgtaattatcgagaagtaaatacaatagagagtccgtttgtttattagatgtagctatttacgtattttgattaggaggaagaatttccgatatgaaaatatgaattaaggctatttgtataacatcatttgtatttcaaatgacagcatgtagcaattcgacgcaaacaaaaaatgattcgagacctgcccaagcagtacaaaacggaatacaacagcacgtaaaagggaaaggtattgttgatattccagggaattataaggggaaattaaaagacttagagaccgttaaagggaaggtattacatataaaagacggagatacaatagacgtaaacgtaaaggggcagaaacagatggtaaggttactgttattagatacccctgagtctgtatctcaaaaaattccaccacaaaagatgggaaaagaaccatcttcctttttaaagaaacagctagaagggaaaagtgtaacatttgtttatgatcggggaccaaaagaagacaaatacggtagaaaattggcttatgtattttgcgatggaatacacatcaacgaattaatggtcaagtcgggttatgggattatagcctatatttctagacctaatactacaattctatctgaaatgaaagaagcagaaaatgaagcaaaagaatcaaaggttggcgtatggagcattaaaggctttgtagatgaaaagaaccagcattataaccgtaaagatgcagcttaacaccctaacccattgcaatacaaatatttgtgcaaaatggaggttttttgaatgaatgaaaacaaaagaaatatgctcttatcctttattatttcaattttatttattttcgcgagtctattgccatttagtaataatgaatatgtgtatgttatctccaaaattggtgctgcagcaggtgtaataaatattgtgatgatgagcgttttcttgtattttcaaagcaaaaaaacgggacatttattaaattggtaattaaagctaaatagttttccttactcatatccttttaagtttggtaaggaaagccgaaaaggagtgtgaaaggtgagtcaagtacctggatttttaaagtttgttttagcgaaagaaagacggtatgtatatttagttgtaggagaaaagaaaaacaaaaaagtacttacacacatggtatatagatttggttcgctagaaaaagcattagaaaccatgtacgaaatgcgtggtgattttgaaaatcttttccctctagaattaaaagagaggggatacgactgagaagatatcaatgattggatactttctattgaaacagggtactcgaaacacggaaataaactagtcatatactagcaaatgttttgtattttaaaaaataggtgaggcgaaaataagatgttgatcattcaaaagtatcacattgtaattgcttggacgatagctactagtgcaatgttaattagtttgttttttagtgaatggatgaagctgccgccatgtgatttttgctggtaccaaagaatggccatgtatccattagtattaatatgggggtagggatatatagaaaagattcgcacgtaagcacgtatgcatttccatttgcgtgtatcggtttaatgttatctgtatatcaaattacaattcaagcgtttcctaatagtgagatgcagatttgttcagtaggagtttcttgcacaaaagattacttaaatttattcggtttcatctcgatacctatgctatcttttgttggatttttagctatcataatacttctatatattaaatctgagagagacaaaagaataaacaatacagcgattatgaacaatatgctcgaataaacaaaaaatacctataaatagataaaaatataaagaaattaaaaaaggagaaataaaaaatgacaacaatgcaagtaagtaatgaaatgtacaaaattccagaggcagatatagaactattaaaaatcatggcccatccagttagattacaaattgtgaaggagctagaacaccacaaaatttgtaatgtaacacagttaacagagctattagatgttcctcaatctaccgtatctcagcatttatctaaaatgcgtggaaaaattcttcgctcagaaagaagaggattagagatgtattatcatattgtgaattccaaggcatgtcagattgtcggagtattaggtatttaattctaaatcgaaataggatgatagaaagagtgttgttaaatatagctgcaaaagatgatgtactgcagaatgataaattcacaagcttaaagtttagtccttctaataatggaggagctgactgtggtgaaaaattgatatagaggttactaaaaaagagtgcagtacatgtctgcattctttttctttgtgccatagctataatagataaagtattttgttttgtatgactctgaataggggatacagtgttttgctatgcgaaaacgatattttcgactttttaagcaaaggggataattagtttattgatgtgtatagtatgaattaaggtttagaatattctgtgtcaatattatcaatttactatagtttccaattatgtaaaaatagaattgattataattttccgtaaatattagattgaaaactattataaggggaatgtgagtatttatagctgtttataaacgatgattggggatacagacaatagggtgatcaagtactggtagaatttatcaaacaaaatgaggtgactttaacttgagagaaattgcaaaaaaagtaaaaatgatacgtttacaggaggagcattccgggcttaaggcagacgcagaacagtattcttccaagcgatgtaaaatagaaagagagggtattaatttagaaaaaaatagagttaaaaaacgaactcaaaaatttcaaacgtcagaagaaaaatgggacataaaatgtaaaaaagcagtacaattatttaatcaaggagaggaatatccaactattgcaaaaaatctgaggtgcaatgtgagtagtttgtatagagaacttaagaaacggggcacattacaaacaccaaagcaggtagcagtatctaaatcattaaaatcacccataacatcaacacgaacaaaaaaaacaaactttgagagatataaagaatattatatgtacaaatagaagaattcatggctataaatctatacttaattctttagtgttaaaaagctcagattataaaaggtacaatgaaaaaatgcatgtttagcagcaaatcttcttacagtattgatagagcatctttttattttttaggatatttttaaatctaacaaatattgaaggctattacctgttgcttagatcaaaaaaatattcttaaaactaaatccttacttatatttgttgagtagttggttaagaagaggtttttttgcaaatgctaaaataaggatactttgtccaaagcaaaagaatccccatgtcataaaggattcttttaggagagttagagagatgttgtcacttgactcatattgattttacgataaaaagaaagaatattcaaatttattatatatttctcaatatatttcttttatttttatattataattaattctttttattgatgtatatctttctgtggtgaatccttttaataaggattccttttttagtggctcatatattaataatgagccactagagtttaagatagtttatacaacaactattgaaattgcttgattataggggaattgttgatttctattgctggggatcagccctgaaaatttatctacagtaataatgattacaggtattctaacttcgttgattagaaaatttgttattactctttttaaatattttaatctttttaagtttctcttatagatgtaaaaggtttggtgtaattataatgtttttaacgaatttccggaaagaattctccttcctcaagcgtgtgaagggcgtagcccaacggtaggtgggagatgaatttcggtttggcgtagccaaaaggttttcctttttattttgcctctgatataatcagtcttataaattataagggctggtatataaatgaaattagcctttgataactttaaacgtttatattttttagttgacatattaccgcaggtctaaataattaagtttggatgatgatgagggaaatgaaaaataaaaaatccctcttttcatattgagaaagagggatttttacgtacaagttatgcacccgtatataaacgaagtccctcattctatctttcaagcataaagcttgcaggaagtggcacagtattcaaaatgaacctgttgccgaggtttcaaagggccagtccctccacctctcttgatacaatgagtaaacgaataaattttattaatttttgtgtttctttgataattcaaaatcttacaccttgaataatgaagtgtcaactaaatgaaatatagtttaaattttcagttttattaaacgaaaaaaccactgcatagggcagtggtttttctactagaagttaaagttatctggatctggaccaacgcgacgatcttcatttaaagcttgaattgctttcatatcatcagcacttaattcaaagtcgaagatgtttgcattttcaataatgcgatgttctttaattgatttgggaattgttacaacttcgttttgtaaatcccagcgtaaaataatttgcgcagttgatttattatattttgtcgcaatttcttgtaacgttggattatctagtagttgtccttgcattaatggtgaccaagcttcaagctgaatattatgttctttacagaatgcatgtaactcttcttgtgctaaatgtgggtggtattccacttggttgaccattggcttaatttcagcaatttcaaatacgtcttgtaagtggtgaatgtggaaattactcacaccgatagcgcgaacacggccatctttataaagtttttctaatgctttccatgattcggtatatttcccttttacaggccaatgtactaaatataaatctaaatattctagacctaatttctctaatgtagtttcaaatgcttgaagtgttgtttcatatccttgatcgctattccatacttttgaggtaataaataattcttcgcgtgaaacaccggattcacgaatcgcttgtccaacaccttcttcattttgatagattgctgcagtatcgatgctgcggtagccatttttaattgctgcttttacagaatcaattacttctgaaccatcttctactttaaaaacacctaaaccaaaccaaggcatttttacaccgttatgtaatgttgtatagtcttttaaacttgttaaaatcatattatttccccctagcttttttgtttgttgcttctactgctttttgaattgcctctgaaaaattatattcgtataaagttttgagaccctcagctgtggaaccacctggcgttgttacttgttcgcggaggttagctggattttgcgtttgttcgagcatagaagcagagccagaaatcatttgaatgacaagatgttttgcggtttcttcatcgactccataactttttgttgtttcaattaagctttcagcaaagtaataaaggaaggctggtgcacttccagtaactgcagtaagctgatgaacttcttcctcagtacaaagttgcgaagtaccaataccttttaaaagcagttgcagggtttcttgatgcatctcatttactgattgtcccattgtatataaggagatagattttccaatttcagcagctgtattaggcataatccaagcaacaggcgtgccctttgggagtctagcttctaaataagatggtccaatgccagctgcgactgttacgactagttgatttgatattaacggagatagctcagctaataactcttcatgagcagaaggtggcattgctaaaacaaccgtatcaacagatgtaacatgctgtttccaatctgttgcagtagacacattatatcgatgttgtaactgttttagcttttctacgttgcttcgattagagacgataatttcttcgatgtactctttgcttgttttaagtaatccggaaaatatagcttctgccatacgaccggcaccaataaataaaattcgatgtttagttagcatattctttattcctttctagtagagatatgttataaaaacgatatcatctttaagagaatgttgtaaaaagaaaagacttaccgtagatggaatggataatgagaaggcggaaattcatgctaatattaactgttattaatctctttatatgtgtagctggtttgctagagtggaagagcaattataaggggcaagaacatacaaataattatatctagaaaataattagaattgaaaaacccctgaagcatatatgcttcaggggtttactaatagaatataagattatgcttttgtcataccaagtaatacagcgccgccgataattaaaacactacctagtgcaataaagatcaattgacgttttgttttcttttcacctaagaagacaatcgcaccaaatgttgagataacgattccagtttgagataatgggaagcttgttgctactccaacacgtggtaatgaaagaagtaagaataagtttccagttccccatagtaaaccagacaaagcattacggattgcatatttgttaaatggtttatgtttagacgtcagtacaaccgcaccaacaaacataccaactgcttgtggtaaaatagcagaccaaccatcaatattataccaacgaataataattacatatacaagatagccgaaagtagaaacaattaaagtaagaagtccttttttcaattgtccaggtggctgagcattttctttatcatctaatgatgtgaatacaacaccaactacaattaataggattgcaatcgttcccagaatgatcgttgtagtagtagtccactcacggaaagcgataaccccaaagatagaagttgcaacaagttgcataccagtagaaatcgttacagtagttgaaacacctagtttttcaactgtttttaattggtttacttgtcctaaagcccagaataaacctgaaataaaaccaacaattaagattgtcattgttaaagctggttgagtaaatacatacataattgttgcgaagaatagagcaccgattgtcatacctaccgtttggctatatgcaccaccgcccatttttacgcttactaataagatgtttccccatgcaattgcaggaagaagcgctaataaaatgtccattacaagactcccttcggtttgctataccaatatagttacatatcgttctaacgatcggtaatgccccactaatagagtagaagattaccgatcgctaaaacaggatgaagaattcacaatataaatgcgttttcatttcttcattttttgaaacacctccatataataacaggaaattgcctattttagaaagtgaattcaaataaaatgtatatttaaataagaggtaaaattcagttatttcccattggtatattttatttcctaagaaataaagaagcagcttcgacaaaagctgctttaagagttagtgattcttttattaataagttgaatacatagtagaaatacgagtgacataccgatagtaataactacaagtgtccaggcgagttgcatattacttgcatcaatagccatgtaaattgcagttgggattgtctgtgttttaccaggaatgttcccggcaaacatgagtgtagcaccaaactcaccgagcgcgcggacaaagctcaaaatcatcccgcttagtaaggcaggaaatgcgagtggaagtgtaacgtgcagaaaaacttgatattcacttgcgccaaggtcacgagcactttcttcaatttgtacatttgcgatagaaaatcccgttttcgctgattggtacataagcggaaatgcaacaactgtagaagcgataatcgcagcagtagatgtgaacataatagactgctgaaataatgattcaacccactttccgatcgggctgttgtttccaaagatgataatgagaaagaagccgataacagttggtggaagtaccattggtaataaaaatatggtttctaatagtactttatatcgccatgaggagcgagctagtgctcgcccgacaattgtccctaaaattgtaacgagaatagtggcgcacgcagctactcttaaagatagaaagacaggcgataaaatagcatcaatgctcatagtaattacgacagaactgtaaatccatatttcttaaagatagattgtgcatcttttgactgcaaatactcataaaatgaagtcgcctctttcttatgtttagattcctttataacacctaaaggatagtggattggctcatgagaagtagctgctgctgtctcaccaatctttactttatccgaaatgagagcatctgttttgtatacgatgccagcatcgacattccctgtttctacatatgttaacacttggcgaacatcttttgtaaatacgactttattttgaacatcattccaaaggttttcgtgtgttagagaagcctttgcatatttgccagcaggtacagattcaggtgtaccaagtgcaatttttttgattttctcatcttttaaatcttgaaattttgtaagtgaactatctttagggatgactagaactagttcatttccaagaagatttttcccttctttttcactaatgaatcctttttttacaagggtttggaatttatcttctgctgcagagaagaataaatcagcaggtgcaccttgttcaatttgttgttgaagtgctccagaagcaccgaagttaaaagaaagtttgatatttggctctttttctttatattgtttttcgatttcttttaatgcatcttgtaagcttgcagcagctgagatagtcagttcaactgttttatcctctttagcagctgactttgtatgcttttccccacttgtacaagcagcactaaatataagaaggaaagaaagtataagtgccccgatggaacgtaatgtaaatttattcataaaaaaatcccctttcgttttgatacatctaattataactaattatatctaaatataactagttataattgaatgtaatttgaacatatatctatttttaaaaaataggagaaatattcttttctttgttacaatgaaaggagaaagtgaggaatcgtctatggatcatcattcctacacaacggaagaagtagcaaagcgattaaaagtatcaaaattaactgtatacgacttaattaaaaaaggagaacttccttcttatagagttggtagacagatgcgcattgatgcaacagatttagatcaatatataaaacaaatgaaaacaggaaaggtacaagttactcctgtaaaaaacgatggtagtagtatcttgaacacgtgtattattagtggtcaagaactaacgttagatatgttagctaaacgtatagaaaatcgtttgccaagttctaatgttttaagggcgtatcaaggtagcttaacgagtttagtgaaaatgtatcaaggagaaggaagtatcgttagtttgcatttgtttgatggtgaaactggtacatataatgttccttacgtaaaacgcattttagtaggacagccatgcattatgattaatttattgtccagaaatgtaggattttatgtccgaaaaggaaatccgaagagaataaaggcatgggctgacatatccgggtccactataaagtttgtgaatcgagaaaagggttctggtattagagtgttagtcgatgaacaattacgaatccaaaaattaaataaagctgatattagtggatatgaatgggaagaatcgaatcatcttggtgttgccacgcaagttgcaaatggaaaagctgatgtaggagtaggttcagaaaagttttcgcaaattgtaaatgtggactttattccaatcatgaaagaacagtatgatttagtaattttgaagaataaagaaaatgaagagttgattgaagttgtgaaagacattctgcaatcggaagaatttcataatgaattaaatgcgattggcggatatgatattacgaaaacaggtcaaattgtatatgaaacaaactaaaaagctgcttgtctataagacgagcagctttttctatatataaagggggttggggaaacaaagtgttaaacaagaccttgagcaagtgtataaatgaaagccgtaagaagagtggctccacttgcaagtacgataaagtctgatttgttgaaagtaatgttgttcattataaactctccttatttgtttaatgtagttgcaacagcttttgcatcgacaagtgcggatagcaccatgcccattgtatttaaaaatttatttgatttcatattgttcatcatgcgtatccgctccttttcgaattgttgttgccctgcttatgtcttaattataggaaatatggctacttgcaactattgaattagcttacgaaagacttacacttttgtaagaaaaaaagacattcatgtaagaatgtctttcacagcatattgatatgatgatggtcttcaattgtttttaaaaaactacgcattgaattcgtcatatagctatctttacggcgtatgaaaaccgttgaaatactgccgtatttttcagggattgcatgacaatgtaccttacctgctttagaaagatgatggacagcagactgtggtacgagtgtaattccgaggccgagtgcaacgctgtttaatattgtctctaatatattgaattccataattctttttggtagcaaaccttcatctttaagccaacgttctagtttggagcggtatccacatccttggttaaaaacgagtagaggagttgttgtaaattcttctatatgaaaggctttattttgtgttataagcattaatttctctgtactaacatcgtattgttcgattagtggatgtttaataggacctgatataaaggcgccatccaattgatgatcaagtacttctctaattaattcttctgttagacccgcttgtaatgataaatcgacatttggatagcttttatagtaagaagataaaatggtaggcagtgtacttactgtttcgactgtaccgattttcaatataccggagggtgtttcgctatctaaaaatacttgttttagttcgtcgacatcttgcaaaattttactaacataaacgagcatttttcttccttcagctgttaaagtcattcctcgtttatggcggtaaaagagtggggtttttaattcgttttctagttgtttaatacgtgtagttacatttgattgtacataatttaattcctttgctgcgctacttacactaccctgatcggcaacgcttttaaagatttgtaagtctcgtaattccattttgtaatcccccttgatgttaactatcattataaatgatagttaacatcattttgaatcattttacgtgatatattttttcttttacaattctctttgtgcaaatagaaagaaacgggggattgcggtgagaagaggtcaaatgataataggggctgtagcgtgtttaattgcgagtatgtcatggggagcgatgtttccagttgctgatcatgcgctagaatacatagatccattttatttttcgcttattcgctatggagcagtggcgataatgctgattgtattgttgttagtgaaagaaggaaaacaggcatttcgtttagagggaagaggaaagttactcgtcttttttggaacgatggcatttacagtatataatgtcctcatatttttagggcaaatgttgatgggtaagtcgggtgtaatggtagcttccattatggaagcacttatgccgatgatttctatttgtattttatggggatataagcatataaaaccgaagaagtatatgataacgagtatggttattgcttttgtaggagctgtgtttgttattacaaaaggtgacatgagtttctttgtaacattgaaagataatatgttcccattagcatttatatttattggtgttataggctgggttatttatacgatgggtggtcaaacgtgtagtgattggtcaacattacgttattctacgttgacgtgtgtattcggtacgactgttacaggaattataacggtaattattacgtggcttggatatgtttcagttcctagtatgggaacgatttctattgtaaaatatgatttgttatttatgatgacattgccaggtattgtagcgctacttgcttggaactacggtgtgaaaattttatcatccattaatgggattttatttattaattttgtaccaattacgactttagctattatgatgatgcaagggtatcaaatcacaatgtttgatattatagggactgtacttgttattgcagcacttattcgcaataacgtttgccagagaaaagaagaaaatataaataatagagttttacaagaagaacaattacgtcaagctgtttaataggcaaatggaggatttcacatgttagaaagtttattgtttttcttcgccgtcggagttgcctgtgagcttgcagcaattaatcgaaatggtcgtaaaaagataaaacaacaagctgagctgatacagcttttaaaagagttgaaagaaagaaaaaattaaaaagacgaccgggcatagacggtcgtctttttctatataaaggggaaaggggacacaaagttatacaagcgtagcagcgtaaataaaagcagtaagaagaagagagccgctagctaatcctaaaaagtctaatttgttaaaagtgatgttattcataatacattctccttacttgtttaatgtagaagcaacagcttttgcatcgaaaagagccgataataccatgcccattgtatgtaagaaattgttcgttttcattttgttcatcatattaatcgactccttttcgaataattgttgccctgtttctgacttaattgtatgaaatatagtaagaagtaactatcgaattagcttacaagaaaattacacttttgtaagaattgaaatttaacaattcatacttatttttattaccaactcctaaaacttagtgttataattgttgtaagaatatgattatacttcggatgtttagaaaggaacgaaataaatgtataaaccaattacatttttgttgaaatatatatttaaaacagctgggaaagtagaagtgcaaggaagagaaaagctaccagaaggtggtccgtatgttgttgcgtgtacacatacaagttttatggatgtattaatgttagctacagggatgtacccaactcaaattcattacatggcaaaaaaagaattatttgaagggaaattcaaaaattggttctttaaaaatgtaaatgcattccctgtagatcgcgcgaatccgggaccgagtacacttaaaattccatcacgtttattaaaagaaggaaaggtagtagggatttttccgagtggaacgagatcagcggaagatgtttcattaaaagcgggtgctgtgacaattgcgatgcgttctaatgtacctttagtgccggcagcttatgttggtccatcaagtgtaaaagaattaataaaggggaaaaaggcaaaattgatttttggagatccgattcaaattgaggctggagaacaaatagatcgaaaaaccgctatgaaaatgatgacagatcaattaaatgagaagtttgaggagttaaaagaagctttgcaatcaaatcaaaaataagaaaagacgaccgggcatagacggtcgtcttttctattactatttataataaaggggacacaaagttatacaagcgtagcggcgtaaataaaagcagtaagaagaagcgagccactagctagtcctaaaaaatctaatttgttaaaagtgatgttattcataatatattctccttacttgtttaatgtagaagcaacagcttttgcgtcgataagagcggaaaataccatgcccattgtatgtaagaaattgttcgttttcattttgttcatcatattaatccgctccttttcgaatagttgttaccttgtttctgacttaattgtatgaaatgttgcggaaagtcactatcgaattagcttacagaaaaattacacttttgtaagagaaacaaatgaaggtgtaatgataagaagatttgacatatgttcatgagattcattaacttaaagatagaggtgagtgcatggctaatattaaagatatcgcaaagatggcgggagtttcagttacgactgtttcgagagtgttgaatgatcacccatatgtaagtgaagaaaaaaggaaagcggttatagagatagttgagaaattgaattactcgcaaaacgcaaatgctgttcatttatcaaaaggaaagacgaatattgttggtgtgattttaccgtatattaatcatccgtgttttgatgcgatggtgagcggaatgatggagattgcgttaactcataattacagagtgttactttgccaaacgaattataataaaaaagaagaaatgaaaagtttacatatgttaaaaacaaaacaattggatggtcttattatttgttcacgtgcaaatgattgggaaacgatagaaccgtatgcttcttacggcacaataattgcttgtgaagataatgatatttcaaacatctcaagtgtatatacgaatcattcagcggcctttcaattaggaatggattatttgattgagaaaggttataaaaaaattggctattgtacgggaagaaaattagggccgagtagtcaaaagcgttttgatgtttataaacagcaattgcaatctatagatgaagaggttaacgaagaatggatttttacagaatgttttacactagaagatggtgtaaaagtggctcataagttaaaagagatgcaggatcttcctggagcattaatagtagcaggtgatgaagttgcgattggggttatgacagaggttgaaaaattagggattcaagttcctgaggatttagcgattattggctttgataatcaacctatctcgcaagtgttacaattgacaactattgatcaaaatttaaaggagatagggaaaactgcttttgaaatgttgcatagaaaagtgaatgacgagagttctaaacaagaaaagctggaaattccatacgaacttgtggaacgctctacagtttaatcttaatccgttatgtgtataatcgcataacggattatttttttgaaatatctttgacaggaaacgcgtttcatactttataaaggagttaaaccggtctgtaatatccatggattcttttcaagtgttaaagcagtgaatagaatttggaggaatatgcatgaatgaacttttatcgagtatgaaaaagtatgtagatgatgatgaaaagattttagtttttgtggtagggatctttgagaaggataatttcatgttatgttatcaacatggaatttttgttgccactactagacgcctcctgttttacgggaaatttccttactatccttcaacatttaaagagtactcatatgtgcatatagatagcatagattttcatccgtactttgagtttacttgtaatcatgaaaccattcgcgctaagtatattcagaaagggaatgtggagcaatttgtccgtgcagttagagcaaatatgaataattaatcaaccctctgtttaaacataatatttcaatttttaagagggaaaatgcggaataaaaaccacttctaaacctctaggagatagtgatacaatgtcaaatggggggagggtatgaactatggttaatcaacgtataaaggaaataacactaattacaattggttcattattattcgcaattggtattaattactttgcaattccaaaccgtttatcggaaggtggaattattggtttaacggttgttacgtactacttatttgattggtcaccagggattgtgaattttgctataaatgcaattttactagctattggttataaattttttgataagaaaacaatgatttatacaattttagggattgtagaaacatctttgtttttatacgttacagaacatattgagtatcatgtaaatagtgatacattattagcagctttatttgctggtttatttgtgggtattggattaggctgtatgttcaaagccggaggtacatcgggagggtcagcaatcttagctcggttagcaaatcaatatttaggttggagcgtaggtaaaggcgtactaattattgatattgttgtaattgctggttctgtatttataatagggcaagaaaaggcaatgtatacacttgtagctgtgttcatcggagcgaaggtgattgatttcattgtagaaggaatggatacaaaaacggctgttacgattatttcgaatcaaccagatttaattcgtgaagctattacgaaaaatatgacacgcggtgttactgtattagaagggcgcggcggatatactggtaaaaataaagaagttttatatgttgttattaataaacaagagcttgttaagttaaaacaagttattagccgggtagatgaagatgctttcgttgttatacatgatgtacgtgatgtacttggcggtggctttaaagcaagctaaaaggtgaacgagtaaattcgttcaccttttttaattcttacaaaaatgtaagtgtaatgtaatgagattcaatagtagattttattccccctttttaaaatggatgtatatatatcctgcagaggaggaatgtttattatgaagaaaaaaatgatcactactataatagcgatgatagtgatagtagtaatgttactgcctacgaaacttggaccggttatcgataaatataatccattttataagacgaaagaatactatacggttgtgaatacaattggtcagcatattggtgatgagtggtatgaatatgaatttattgcattcgatgaacgtggtagagagcagaaaataaagaaaacggttaagcatatgttaaagagagatgaagcattaaaggtttttgcaaaaggacgttacggtgaatcgattgaagagattgaggttgcaaatattcctataaatgcgaagagtaaacttttaacgatgagatagtaaaatatacccccagctattttttgtcgaaaataaaaataccaggtaagggtattttaggagttaataaaaaagccttagtccatatagactaaggcttttttattatataaaggggaagggggtacattgtagtagcatggttgaaaggtataagaagagtagctactagcaatgcaatttggttatttgagtgttcttcttatttggcttactttctaactttattgtacgaaatataagtaagggaaactatcgaattacattacacatagcttacaaacatgtaagtcttctgtaatgtaattcgatggttaaaagatagtgaattttatatagtgtaattagaaagtctcactgtattactttccgtttgtaatataaatgaagaatgaaaaccaactactttttaatagccctcatctgtatgtagatgaggctctttttataaaccttacaatattgtaaggtttacgtaagttaattcgatagtaaatttgtcatattttttgcataatagatacagatagaaaaataattagggatctagtaagaagggagaaaaatgggatgcgtaaagaagaagtagtgaagttaccaattaaagatttctgtagctactttactgttgccgtagtgtgtattggattatttgatatcataacaaacttaattgttaaataatatagatgctaaaacaagaaaggaagtcctttcttgttttttttatgggggcataaagatgaaatggattgatagtcatatacatgttgatcaatataaggatgaagagaagaacagattactgaaagaggtggaaaatagtaatgaaataaaggggcttattgctgtatctatgaattatcaatcttgtaaggaaacgttatctttagcgaagaagtatccctttatatatccagcgatagggtttcatccagagcaacagattcataaagaagagtgtgaacagatttataaacttattgaacagaacgcagaggaaattgttgcgattggtgaagtaggtttgccctattatttgaggaaagaagatgaaagcattgctgtagatccatacatagctgtattgaaaaaatttatagaactagctagtaagtataatttgccgattgtattacacgcagtttatgaagatgctgacactgtatgtgatttgctagagaaatataaagtttcacgtgcacatttccattggtttaaaggaagtgatgaaacaatgaaacggatgatgaagaatggttattatatttcgattacaccggatgttttacataaggagaagattagaaaaattgtttcgtattatccgcttgaatatatgatggtagaaacagatggaccgtgggaatttcaagacgatgttatgacgcacccgagaatgattcgagatgtattaaaggaaattagtgttataaaaaacatatctgttgatcaggttgcagaaacaatatatgaaaatacaagtcgattttatttgaaaggataggagaattatagttttaatcatgtaacggaaaaagtgaaaattgaatgtatttaataaaatgccacggtttgatatatgacaaaaaaccaccaagcgttccgctcggtggttttgtattaggattctaatttcttcgcacgttttaataataaaagaaagacaatgataacgaaccccagtataaggaagaagccatattgctttatataatcaattatgtcattcgcactggttggtttttcaacgtgaatgccgtctttattcgtcgtaatatgaatatctttcatttttacttcattcttttccttttgtaaatcaatccactctatatttggaatactttctagatcctttaatacttcttttaatggtttcacacctaagtaaggatgataaaatgccccaataatcccatcggataatttagaaacagatagagcacgttctttcattttagcaatagtttgtggcgtatcttcttcaataaatccgactgtttcaggcaatagtttcattccatgtaaaaatgacggagtacttgtataatatggtgagtgcatggatttccaagttgtatcatttaactgtagttgtcctacataagttgaaaagtaccttgataatatttcatatcctttttgagacatcgtgtaatgaggtgcttcaaaggcaacaggatatagtttagcatctacaagttcttgaattcctttttcaatatgatctttcgtatatttcccctcgaattcttcccctttttttacatattggttatatgcctctatatttggaaagtcatcttttgtcttcggtttttcatgcttcggttggcgaattggttgatctgttttgacatcccaaaattcaaagccctcacctgtttcactgtcataaaattggtgagtataaccatgcataataattgctgcaccatcatcttgcatagagcgtaaaagatcaactagttctggtttatcttttaaatgtattatctttcctgtatctggatctttatataccggaataacagtaatcatgtaaggcatctttttctcttttagtaattcagcaatttctttcaattgatttatatctgctgctgggtgaacatcctcaagacgtaaataagcttcaactttatttttcgttggtttttggctgaaataagaaaataacatttcaccgacgtaatgagacatccagtcaaagaggttaggtgttgcaacataataagatatttcatgctgaacgattagtgggttagtgttatttgagcttaaagcgttagcaagcacagttccattcgtatcaaatgattgaattaatcgttcctcttctaaggtattttttagcttcttttctggatattcaattttattaactcgtatatcgtcactcttcaatgtaatgaaagaaaaacgcttagataattgttcaacattttgtcctaatactaatacaggaccggagaagttttctagaaattgtttcgtttcatcagaaaacgcttcttttgtttcaccgatataaacaatatgtgtataggaggatacgttattaattgaagttgcttcttttaagttttttagggttatatcatttgtaaaatgtcctaattgagtattaaggatttggacattatttgaaactttatcgtcttgtgtactatacaaaacaagtacttttggttttgatgatgtttgtgcagaggtgtaggtagggatgagtagtaaaatgctgaacaagagtgttaggcattttttcattttgtacgctcctattctatatatagagttcagtttacaattatatacaaaaaatgcgttatagtctatgaaagttacattttttcacatatttaccagctgttttttcacaaaatcggtctaaagcatgatgataatacgtatagttatttgctatgataaaagagtaatagaatgtaggtaattgtaaagggaaggctgaaaggggacaaatttcagcggagaaagaggtagaggtagtgaagaaattctttgtaggatttttagttgttcttggagtatatttatatttccaaggaaagtctgaaggaatggataagctagtgaatggaacaagctatgttgattcagaagaagcaaaacagatgaaacaaatcattatagaggaagcgaagaaagtaaatcttccagaatggatacctcttgcaattgccgagcatgaaagtcgattaaatccaagaagtgttggagataatggaacttcattcggattgtttcaactacaccgcggcggcgggcttgcaccagaacatttaactgatgatgagctgaaagatccacgtacaaatgcgcaaattgcaatgccgcatttaatgaaaggatataagcgtggggtgcaaaaaggtttgactgattttgcattactgaaatatatagcgaatacatctggatggccagggaatttagggccagagtggacggataataacatgaagtataacatcggactagaagatgtgtactatcgaaataaaggtgtaataaagtgaaactttaatcagtgggggagtctgttcatcccccgctgattattagtcttcaccaatcgggcttttacgagcagttaatcttccgcctaaattctagcgttttccggattttgaggtggaagttttactgctcgttaatgcggggtcaaagagtaggttttctatacctactctgtttttttatgaataatttcatccttttctttcgtgaaatactgcgtgagttgtattttcacctcttctagttttgtagaaacttgcggtattttatatcctacatacaatggtgaaacgacaaatctaggtacaactttacaaatgatttttccatttaagtaataaaagaataagttataactactgcatcctttatggaaatctatcagtatgtaacgtacagtttgctgaatgtaatttgccatttcatctatatatgaaatattatcaatgattatattgaattcagtgaagccaataatgggacgctctgaaatattaagctcaatgcgttcatttttttgaacaattaccccttgaaaattttcttcttcaatattttcaagataatctacatatttcattccgataatttgcatgtgtgcatgatgcaaacttccacctgaaaatggaccgtgatttttgtataaaattacagatgcaaattctgcgttcttctgtaagtgtaaccaatgttgaatagaaaattgcattaattttcgcatatgttcttctgtatatgttgcgatatgatcttcgcaattatccgtttcaatcagcaccgtttgaaatgtatcttgtaatgtaggaaatttattttttaaccaaataatagaaccatcagttgctaaaatatccgttaaatgttctttatcgcaaaatggacatgcagcgcttctattccgaatactttctggtttttgtttaccgatatcgtttaaaaaatatagttgttgtgtatccatttgtatatatgcccctttaaaatatgtgtaaaaatcccgcttaatacattcgggaaaaggagaaggaaatcctctaaagacaatatggaaaaaataaaagacaagatatcctcattacgatagggtaccttgtcttttattttttctctaatagtgtgtatggataatatagaacattttcattatttttcttttttctattttttattgtgtataaagtaattgctgtgcttgcaattataataatggctttcttcatattcatatacccctttttattgttggtttaattcttggctaactgcttttgcatcgactaaagcgtgtaaaatcattttcaccatgttcatcatatttcttcactcctttttatagttcatttagttcttttacaactgcttgtccgttcactaatacctcaaagattgcttttacgatttctttcatcatgtttgtttcctccttgtgtttgtctctcttgttttacatctttattgtatagggaggcatcttttcgtactatcgctttccattacgtgaacataacagttttgtaagatttgatgtcacttattgaaatgtttagtctatcttcattattttcagaaaaatgactattcaaacatgaaattggaaagtataataaagaagtaagtattaaattccgtacgaaaggggtgaatgagatgaaacgttctttagctgcgcgtgccaaatttttagattttatctatttttgtcgtgcgatttttcatgatgtagttgttaacgggatacgtatgcccttttttaacaattgcatagtgactattgaacgatagaaatctcttcacccatttttaataaacgtgtgaaaagggagctatttggcttcctttttctatgccgaaaaccatggggaatgtttctttctcatggttttttatattgaaaggagtacggaaaatgactatttgtagtgtaaataatgtaacgaaatctgttggtggaaacatcatatttgaaaatatatcgcttgaaataaagaatggtgaacgtgttgggttagttggtcgtaacggtagtgggaagacaacaatctttgggcttctaacgggaatggagagtttggatgcaggagccatccatatgaagaaaggtacacgtattggtcatgtcgcacaaattccgaagtttgatgaggtcatgactgtatatgatgtattgagttccgcttttaaagtagaaaaggaattagaaaaagaaatgcatgctctagaaaaaaatatggcggaggagcaggaacaatcttctttgcaaaagctaatggagaggtacggaataattcaagaaaaatttgcatttctcggtggttatgaaatagaggcaaatataatgaaggtagcaaatggcttacaagtaacagacttatttccaagagtatttacggaattaagtggaggagaacagacgaaagtaagccttgcatatatgctattgcagaaaccagatttacttctattagatgaaccaacaaatcatttagatttgtttgcagttgaatggttagagaaatttttaaaagaatataatggaacagttatggttatttcacacgatcgctatttccttgatgaagttgtaacgaaaatttttgatttggaagatggagagattcacgtgtaccatacgaattattcccagttcgttgaggagaaggaagaaagattacttcaagagtttcaagcttatcaagagcagcaaaagaaaataaagaaaatgaaagaagcaattaagcgcctacgtgaatgggcaaatcaagcgaatcctccgaatgaaggattgcataaaagagcgaggaatatggaacgtgcgttagagcgtatagagaaattaaagagaccgattttagaaagaaaacagatgggtcttcagtttgaagggcaagagagaagcggaaaagatgttgttgtaatgaaagaagtgagtaaaggttttgctggccgatctttatttgaacaagcgaatttacatgttcgttttcaagagcgtgctgctatcgttggtcgtaatggtacaggaaagactacattattaaaactactattagaagaaataaatccagacgttggtgaaattcgaattggtagtagtgtcaaaattggttatttatcacaacatgcatatgaaaatatgaagagtaatgtattggaagcgtttagagagtatgtggctgtaacagaaggagaagcaagacatatattagctaagtttttattttatggtccagcggtgtttaagaaagtaacacaactgagcggtggagaaaaaatgaggttaagacttgcgcaacttatgtatcaagacatcaattttctaattttagatgagccgacaaaccaccttgatattgaatcaagggaagttttagaggaagcccttgagcaatataatgggacgattttagctgtttcacacgatcgatattttttaaataagttatttgaaaagacgtactggattgatagatgcaaattatttgagtttgcaggaaattatgcatgggctcgtcaaaagtgggaggaaaagattgagaagcaagtaataaagcagaaacgccaagggagaaaaagtgttgaaacggttcctgtaaaagagaaagaagctaggaatcttgaagagattgaaaatgagttaatgcatgtagaagaagatatatatgcaatagaatgtggaatggaacatgtagctgatgttgaaaaacttgaaaaattatatgaggaaaaaacgaagaaagagttgttacgagcagatttatataatgaattagagaatattgtggagtaatgagtagaaagccacttcctttcagttttgctggaggaagtggctttcttcataatgatattttgctttaaaggttaaatgaagcgatgtgtttcacgtgaaacagtaacttaaataaatccgtgttcctcaatttgcatagcttgtgaaacatatgaaaataataaggtaaaaaataaatgtcattagtggtttttggataggcgtaattacaaaaacaaaggctaattatttcccgagagataaagtgagggattttacgggcaccccgacccagacctaacttcttttgctttcgctgaattttgaggtgggggtcttactgcacggcaaatagcgggataaatatgtgtaacagagactagtgaatggaaacgaaaagagagcaaagttacagctttacgcgctgaactctgctctctttttgcgtggcatcttctctcgttgaaattataatagcgatcccgagcataataaaaaaagctaaaaagaggacgaactttgggaagaacgggaatagtaatagcgctccgactatcataattgttaataatacgtagtgcaggacgtattggaataggttgtccatattttcgccccctttttggtaattggttattagtattctatgtttcatgctgaaggaatagaagtagatttttaagttttaatacgaattatagctgagttttcttaaagtataaatgtagagtgaaaattttggaaaaattctcaaaatatttatttagaaagaattgacaaaacataatgaacgatataagctaataaccataaagtctaccggaaaagtcggaataagattgttacccctcaaaaacatctatttttttctgattaaaaccgacttttccgattggctataaatgtgctgtgggaggcatacataagctaataagttcaagggtataactattaaacagttagggtggggacaatgaagaaaaagacaaaaaaatgggctggtgtattttcagtattactgagtagttcgcttgtgttatctgcttgtgggggacaggaggatacggcttctacagagccggttaagcagcaggatttaaaaaatgtgaaaattgaaaagattgccgcgacagataaaacgaaagtgccagacaaagcgaagaatagaaaagatacgttagtagttggtattagtaagccaggcggcgtatttttaccatactttcaacaaaatggttgggatggaaacgtaacttcagttatttttgcatctctcgtatcaaccgataaacaagggaaaccaattccagaattagctgagaagtgggacgtttcttctgatcagttaacatatacattccatttacgtaaaaatttgaaatttagtgatggatcgccattaacggcggatgatgtagctttcacattgacgcttttacatgataaggcatatgaaggtgaagtagatatctctcaatatgccgttaaaggtggtaaagaatataaagaaggaaaagcaacttcaattgaaggtattcaagttgttgatccacaaacaattaaaattacaactgaaaaagtgaattcacaagctatatttgttttaggaggtacagtactatcaaaagcttattatggaaaagattataagcaaaatacaagcttagattacttaaaagatttatatggaaagccattagctgcgggtccatataaatttgaaaagtatattccaggtcaagaagttcgttttgttgctaacgaaaattattatgcgggtaaaccaaaaattcaaaactttatttataaaattacttctggtgatacgaagcttcagttattccaaacaggagaagttgaccatactggcttaggtaccggtgatgaggttcttgaacaggctaaggctttagaattcgcaaatatccaaatcgaaacagcgccgtcatttagttatatttatatgaataataataagccttacttaaaggataaaaaggttcgccaagcacttatttacggattagaccgcaaaaaatatgttgatacagcgttaaaaggatacggtacagtagccaatgtaccaattcatccaacttcttgggcttatacggaagaaggagttaataaatacgaatacgataaagaaaaagcgaaaaaattattagatgaagcagggtggaaagttggttcggatggaattcgtgaaaaagatggtcaaaaattaaaactttcttatttcggtccaagttcggctaaagatagtgatttattaattccgattgcgaaagagaattataaagaaataggtgtagagtttaatcctgaatttatggactttaatacgatgctttctaaggtaaacaaaggagattatgatttagcttctgtttcgacaccgattacaagtgacccgagtgaaacagctggtgaatatttgtctactgcaaatgaaactagtcttggttataagaatgcaaaagtagatgagctaattcaaaaaggtattgaaactgtagatatcgaaaagcgtaaacctatttataaagaattgtataaagaattaagtgatgatccaccagtaattctattaaactaccgtagaacaattactggttataacgggaatataaaaggaattgatcctgaaaagtacaacagtattagtgcaaacttaccagtattatcatttgaaaaataacgataagaatgtataagtagaagacattttttcattcggttagtaatgtgccgctttgaaaaaatgttcttctattttaagcataagattggagagaaaaagggtgaaaacatatattgttcgtaggttgttacaaatgattcctacactgcttggtacatcaattattatcttcgtcctgttcgcacttcttcctggggattatattgattcaaacccgaaaattacaccggaaagagcagctgaactgagggaattatatgggttgaacaaaccaattgttgagcgttattttcattggttaggtaatgcattgcaaggggactttggcttctcgcttcaatatcaagagcctgtaacgtcattattaaataaatttatttggaattcttttagtgtagcaattattgcattgttttttatttggctaattgcacttattatcggtgtattctcggcgacgaagcaacattctttattcgataaacttgtaacaatcggtgtttttgcagcaatgtcatttccttcattctttatcggcttgtttttaattaaggtgtttgcggttgactttaagttattaccgataggtggaatgattgatgttggcagtaattcaacaggatttgcttacgtgatagaagttgcaaaacatatgattttaccagtatttattttaacacttcttggggtcggctcgcatgcccatcaacttaagaatttgcactacccccaagtgtcaaaaaacgttattcttcacgatccgttgtcgcatactctaaaatacaccccatcggacaagcaaatgcattcatttcttctacatatttaaattggctttttgaccctttacgctccttgaggaaggagtcttcttggctaaaatgataaatttgaagctataaaagtaacagaattatgtaataagtgaatcaaaaaaacaaccccaaaagcagacatggtaacctgatatttttcattcttttttttatatacccaataagcatagttatataaaagaccaattatcgttgtaccaactatataagtgattccatatggatgatttaatccaaatataattgaagctattaatatgataaggtaatcgtgatttttaatgtaaggaatccaacttaatagccaaaataaaaatacttgaaaaactattgtttcatatataggtgccgctaatacccctaataaaacttgaagaataagaggtgcttctgttattgggtttttttgtatttcaggtaagaatagatctaatggtattacaaataaaaatgatcctaataaaataagaaaaataaaagaaatggtaggcaaagcaaacataaatctatttatttttttgagcatatatatttctcctataatcttttattacatctatacgaaaagtaataaataattgagtctctttttgtttgacatgtttttgtctactattgatgaaaaccgttctgtaattgaattcttggcttatatgtaggtgtagcgataaagtagggatatattaacactatattgttaatattaaaatattaaagagctaagtgagatattaagttcacaccaattttatgatgaatataatatcaagccagttaaggaaatatgctgtataggacacgcttgtactgtttattttactatatgaatatttaagtgcatatagttttggaggagtatgtatttttgcattttttaatacaaaagttttttgttaaaaatttactttctgcgctacctcatatgaatttaagacacttgaagagtaaaggccaaaagagtctaagtttagattgtacaggtaaatattataatattatagaaaaataaggggaaaagttataaaataggagattgaattaaactttcagattttattgttctgcaagataaaaataactaaagatgaggctcttaaaaattcttatctttatttaaaactaacgatattataaaaaatccttgctgaaggtactgcaacaaatctaatttgaaaatctttaggagataaatatggaattttaaatattcttagtcgtctataaaacattatagcaattattataggcaaatcctttaatatcatcgatttagaagaaatcagtacaaatagaaaagatgaagtggtagaagtattacgtcttccttttaatagatttccaagagcagctggacatataaaagatgcaattgtaaatgaaaaaaattggaacatttagttgaacgattagtatgccattttaaagtttaaattaataacagaaagagcacctcttaatatgttactactttgtttttgtattgttgaaaataagaaaggagaaatcaatgaaaaaatattggcataagctatcgttacttcaaaaaaatgtattactaacggtattagtaattctgacccttgttggaagtatgggagcgttaagttttaatatgtttcaaaatagtatgatgtctatatttgagaggcagtcttttgaaacaggtgatgcggtattaaatcaattagatctagaaatagtaagagatgtagcaaaagaccccacagctcaaagagtgaagaaagaaaaattgacagagcaattaaataaatctataaaagatatgaaaagtgttggacaaacatatgttacaggagccaagctaaatgaaaaagctgaattacaaatagtagctttggatacagaattagcaaatactgtttctgtaaaaccaggtgaatactatgagcagcctacttattggatgaaaacatatgataaagtaatacaaacaaaacaggcacaaatgacagaagtgtatgaagatgaattagggttctgggtaacaattttagagccagttacagatgaaaataaaaatataattgcaattgttgcagcggatttggaagcttctattattccacttacaaagaaaaactttatgatacaaggtttactatttattataatttcattaactatcgcaattacaattcaaatatttatctcacgaaactctctatcgcctttaaaggatttacaagaagggttacgtaaagttggtgaaggggatttaagtattaaattgaatgaaagatctgatgatatagggataactaatatctattttaataacactattaaaaagtttaataagattatagataaagtaagggagactgctgaacaagtttcgacatcttcacaggaattgtcggtaagtacaaaagagaatagcatagcctttaaagaaattgcaagtgctattacaggattaaatttaggagcacattctcatgaatatgtagtgcaaaaatgtttagggattgttcaagaaatggaaagtaagatgaaagaaattaaaggagctgcaaaacaagttggcaatgctttggaagacatggaacagcattctgtagagggaaaagatttgattaagcaaatcgtgaatcaaatgaaaagaatccaagatacagttcaggatgtatcttctagtatttatgcattcgaagcacgatctaaggaaattcatgaaattcttactgtaattacaaccatttcaaatcaaacaaattcattagctttaaatgcttctactgaatcctcatgtgctggagagatgggggaagaattttcaggtgttgcggacgaggtacatatattagcggaaagaaccgaggcatctgcaagggatatagctaaattaattggtgaaacccaggctgaagcagagagagctgtaagatccatacagaagagttcaaaggaagtagaagtaggaataacacttgttcaaagtagtggtgctttttttgaaaagatttcagaatctgcacaatctgttacaaatcaaattaaagcgacttcgaatcattcaagtgaaattctaacagataatcaaactattgttcagtttataaatgaattatcacacattgcgaatacatatgtgaatagtagtagtaatgtggagacaagtatgaaagagcaagaactatatgtacaagatattgcagagttagcaaattctctaaattggctctcgcaagagttacaggggttaataggggaatttaaaagtaagtaggatagaagaaggtaaaggtatagggtatgacctatacctttatttattcccacataagggatgaaagcttaggtatatatgtaaaatagctaaacgaataatttttttgcatattttgttggaaatagagcatgatattaccaaattcaacggaggtgtttaaaaaatgcaaattcgcgaaaataataattcaaacgaaatcttaatagcagctgcagcaagtgcaattgagcaaatgaaatatgaaattgctcaggagtttggtgttacacttggaccagattcaacagcacgagcgaatggttcagtaggtggagagattacgaaacgtttagttcgtatggcgcaagagcagttatctggtcaatataaaattcactaaaactaaaggtatatcccattgaagggatatacctttttaatttgtttttaaagaggatcgttacattttttattattggttaagtttagaaacagcaaatttagctgtaaaattcatcttcttcatgtacgtagaatttacacctgcttgaaattgtacagaaatattaccgtctttttgcgctttaaatacgcgaccatatggggaattagcattgaatgtgccaattacttgattatccgcatcaaagaccgtataagaaattgggaaccctgaattttgtacaaagactgtaagttcttccccttttttaagattaaatgattctttttgagacacttcataggaactcatagagtagtattttgtgacttcttgaatttctaaattcgtagtagctgcactcgcttttgatgcctcagcccctggtaagtttatacctgaaaatactgcaattcctagtgcccctgctaaaatcaattttttcataatagtatttcctcctttaatatattgtgagatttgaaacgaaagtgaaaatttcaatccctgaaaccattatagttacaatgagaattattttcaataagggttagtatgtaattttgcatatataaagtattaacataaggtaatcagtcaagttttgaagtattcttaacagaagggaaggaaaaaattaaaaaatcatgaatgatattgtaaccgaactatatatcttttgagaatattccgtctgcatcaagtgaatatattattaattttatttgtatttgttttttatcataaaacattttaaggttgataaagtttcattgagtgggattattaaacaaaaattacaaattatatgttatgataaaaaggcaataaagtacatcatcctgactttattgtatgtgtttagcctatgtatgtcgtttgtattaaaaataagaagtctcttaaaaagagacttcttattttttgtatggagggggtattacagatgattgattactatcaaatgtttttaattactatggcaggtattgccttattttttttatatacaacatgctggaaaaccaacgaaaagaaacaaatggaagtttttaattgtagtattttattttaccttttgaattatttatttcttaaatttttatagatagatgtagaggagatacgtttatcattctaaaaaataatgaaaggaaggtgtaatccttcctttcattatccagtatgtccgtgcgaatatttaataatatttacagtactttgagtgcctgttgaaggacttgatccaaaagttactgtaacgacaattaaaataccaagtaagctaaccgctaattttttcattttaatgctccttttttaaagtttttttcattggctttactagcttcataaaagtaatagctagcttttagatgattatcttctttgtaaaattggactgctaacttttcggtatattcatttatatactcatatagttcttctcgttcaaaataagaaattccttctaaaacagctttttctaaatcattagcacaactatgaagatttattttttctaaaatattaaagtgatgaatatagccttcggttcccaattgagtagagagttggaggcccttttttattaattcttgagcaatttcatgttctcctaatttataatgttctctagcttcaatgaatacggctttataatcgctaggtagtttttgattaacttcagataaatatcttaatgctacttcagatagattctgtgtagcgtacataaatcctagattgtgacggacaattaaaatattgtattctaaattttctttttggaatgtatccatagcagagataaagtgttcctcagctaactcccattcctttaaatgagtgcatgctaatccatataagttattacaaaaggcaacttttaattcatatccagaatgctttgaaaaaatatcttttgccttcattacatgattaatacataaaattgatctatgtgtatgacagtagaaaatggctaactcataatggaattcagcatgttcaatctcatcaggtatggtttctaacaagtattcggctttatcgtaatggatttttgcaaggctatgattgccagtaacattggaatgaatggctttaaagaagtgataatagtatgaaaggaaatcgtctgtaggagttttgtaagcatcactttgtttaaagctatctttagaaatacttaagctatcaattaaatattgatgcctaaaatctagtagtgagtagtataataatatcgtttgattttcttctatattatggattttgttttcaatttcttgtttaagtaattgagcggcgtctacatgcctagccctaatttcttgataccattcatttaataaatgagttatttgctcgttcccctgtatatgaacattcattgttcaatttcatcctctccaaagatattatgcagcaattagtatcatatcagaaatttcctctatcaaaatctatttaatagcatttatcaatataagacggaatattctatcaatttatatttgttgagattcaagtagtatgtattattgtaatttgtataacaataacctcttttttcaatttaaagatttgatcaaaatatatttttttaacaggaggaaagggagctatacctaagtaattatgtatagggataataggagaatagaaataaataataacggggaatttgaaatgttagagttaaaagaaaagcaagagagaaaagagattttggaagaagataagatgtttaatatcttgtattatgtgaatacagatgagttaaatattatttctgattttaaagaattaaaagagggttgtattcgtatagcaacaaacttatatggtaaaaattcatctgctttacaagctgtcctacaagcttgtaaagcagcttatatttaatctcttaatagggtgtagcttattattcgctattaataaatggataataatattttgacattagaaaagggaacgcttatagagtgtttccttttctaatgtaattgactttattttttagatctcacataaccagctgcttgagcatcagcttctgaacagaaccaaacaatattgtcttttgtagaatcataatattgtccaccaggaacatggtattttttcgaattggcatttcctttaatttgtcctttacaagtggtattggcttctttgtcatcactaggatcattttggaaaggtttccgattagaaccgttatgattaccactagatgaggaaacaacagcattacttttttgtgaagcttcttcctgggccttacggttagcttcttcctgagctttacggttagcttcttcctgagctttacggttagcttcttcctgagctttacgttgagcttcttcttgagctttatggttagcttcttcctgagctttacgttgagtctcttcttgagctttacggttagcttcttcctgagccttacggtcagcttcttcttgagctttacgttcagtttcttcctgagctttacgttgagcttcttccttactctttgtgtctgctgtatcttttttagtatcttgtgaagtggcaactttggtgtctgccttttgtacagtttgattggaagttgattttccatcaataaatacaatacccattaaaaagaaagctagtgctagatataaatatgaatatactactttctttctggttttaatttgtattttgggtaacacaaattgtggtttaattaatccaataattaaagcaagtaagcttaacggaaatcccaaaaaaccaatattaacaagggcagggcggatagaatttggaataattgcttgaagtattaaaaataaaataaagatataaacaatggaagcaataaacattttccatgcggttttagagcgataaccaaaaatttttctccagttcatttaagaacctccttatctaagatactagattttgctcataaattataatactgtaatgatttaatattgagatgcaattcatcacctctcatttaataaaattaatgtatttatgtaacaaatatacatatctaagcatatcattgtcgttaacaaattttccatttttttattttcattttgtcttgtttactcgaaaaattttagtatattagagattttagatgctttattttggctccttcattagcaaatgaaaggttaatcatcatttaaaaggaaaacttggtgttaaaatatgaattaatataagatagtaagtattaattaatctgtataaggaagtgtgtaggtatgaagagaaaagtatcagtggttggtgcggtaattgttaatgaaaataatgaagtcttatgtgcattacgttccccgacaatgacgttacctgattattgggagtttccaggtggtaagataaacaaaggagaagaaccatcagctgcattaattcgtgaaattaaagaagagcttggatgtacaattgttgtagatgagaaggtagaggaagttgagtgcgagtatgaaaccattgttgttcatcttactacatataaagctagaatcttggcaggtaagcctaaagctcttgaacatgcagagctaaaatggatgagtattaaggatttaaagcatttaaagtgggcacccgctgatgttcctacggtagaagcactgtaggaatattttaatcaaatacccttgagaattataattttattatgtaatatataattatattgttagtttatttgatttcgtttattcccacacctaccttccttatgtgttgtggttgagttgtagaagcaagttttttcttgtttcaattttgagagggcttctttgagccgattagtgtatatagcttattttgctatgcacgattaatcgacttaaaggagcctttttttgtttttttaagtggaggtttaaagtaggttttaagctaaagagaaatatgattgtttagaaggaatatatagtgatgaactgaagcctatagcacctaactaaaagagttatatgaaattatagtaagttaaatctcctatagagatttcaaaataccgaagtaataagcgcagttaaaggggaaggtcccaaattcttaaatggacacaataatgcatctatagaagaggagaattaaaattgaaaccaactagagaaaagtacgtaattaatggggagtacacaatagaacgtaagcttttacataatgaaatcattaaattatttctaaatgatcaaccgcagcaagagcaagaacctgaggctatattacttggtggtggttctgctgctggaaaaagctcaattggagagttagtaagtaagggatataaacatcagaaacaaaacatggtttggatagatcctgataagatcaaagaaaaaataccagaatatcaagagttaatagaatccggaaacattgagttaataaaacaagcagcttttttagttcatgatgaaagtagtgatattaccatgaaacttttaaaaatctgcatgaaaagaaaaataaactgtatgtatgatggtacaatgaaaaatgaagtaaaatacaaaaagttaattcaacaattaagactagcaggttttagtattaaagcaattattgtagatgttccaatcaaggttgccttagagcgatccaatttgcgttttaaagtaacaggaagattggtaccccaaagtataattgaagaaagccatatgaaagtagcgactactttttctaaaattaaagatttaatagattgctatactttatatgataatacagggaaggaaccagaagtttttgcttttaaagaatcaaaacgagtaaaagaaattattgttgatgaatgtagaaataatcaatttatcgagaaatcagctcttgttttcaagtgaatatatatcgtttaagttttataagataattaatagatattatcctgacattttattatattattgatataataaatacaggaggcgatataaatggaacttaaagaccttatgaattatattgaagaaaacaaagaagaacattttcatgatttaatcgctaaaaatgaacgggaaattgtaaaaaaagaagaagaagagaaataaaaaatttaaaatagaagagttggccttttgggtcaactcttttgtttttataaatggatataaagttggatttctcaattgttgagtaaaaggaattgcagaatttttctgtagagaaggttgtttggtattgaaaatgaaacagacaatttgctaatcataggagagttttttagtattatattaaatagaaaatagcgtaatgagttaacgctttaggagagagtatatgaatcattttattgttatgcaggggcatacatatcaagaggaaaaaggattagaaattatttggtcacctaaaaaggatagaggcggtaatgtaccacattcatggaaaagaatgatggatgtaaaagagggggatcgaatctttcattatgtaaaagggaatattgtagcagttagtatagctgaagaagattgtaaggaatcgaataaaccatcgattatgaaaagccatgatcaatggaatgatgaaggctatttggtatctttaaaatatcatgagttagaaaaaccaattaatatacgtgagaaatttgaagagatatcgcacctgttgccaattaaatattcaccttttcaatcagatgcaaatggaaaccaaggttatttatatccatgtaatgaagaattagcccttaaattaatggaactaattggtgattcaaacatttataaaatcaatgatgagcaattagagttggcagttgatccggtaagaaggacagaaaacaatacattaattccggttatagctgagacggaatccgaagtaaaagcgaaaatccgaattggacagcaaaaatttagagaggaattaatggagatttggaacggaaaatgtgcattatgcggaataaatttaccagaattgttaagagcaagtcattctaagccatggaaagatagtacaagtatggaacgcttagatccgtataacggtgtactactgtgctgtaatcatgatgctctttatgataaaggttttatcacatttgatggccagggacgactgcatatttcctcattaatagtggaaacagattatttgaaatttggattaataccaaaagctaagataggaattcaaccggagaataaattatactttaagtggcataagaggaatatttttaaaggaaaatagtataatttttaacttcaaggacaggaagaacataagagagacgaattgggttatccagtaaaggggaatggtacatgtataactgtaatcaatgtgggacagaaatgattatgcaattacaagatagatatagagaatagtgtcccaaatgtgaagggcttaaaccaaataacttggtatactataatctatatgaattactagattatatggaagcgaatcgctacatgagtaaggaaaatatgctacataattttttgaagtgggagtttgatttaacaaaagggaatatatttaagttatatttaggcgtagatcaatatgatcaattcaatgatgaggatttcacaagacgattagaggactatatgaaggggattcgattaaaattaaatgttaaatatgaagatgattatatctggattaaggttaattagatggaattccagatgtaatgaattttgttttaaagagatagtaagtaattgagaggggattaatggtgatggaagatttgcaaaatgcagtaataaaatttcgagatgagagaaattgggggcagtttcataatgcgaaggatctagcaatctcgttaaatttagaagcatcagagttgcttgaggcttttcaatggaagtctagtgaagaagcaacagagacgaaaatgcaggacataaaagaagaaatggcggatgtaatgatttatttacttatgctaagtgataaattaaatattgatctagaagaagtagtacatgcaaagttggaaaagaatgcagagaaatatcctgtagaaaaagcatttggaagcaataaaaaatataacgaactgtaaaactataatcgttttacagttttttgaaatgcttatgagaaagcagatggttgagatcatgatttgatgtatggattgtattttaaaagtatgaaatccatacatccttaagtattattaaaattaaaaagtagggagttattcaaatgctatcatttgcagcaaaattatcttcattttacataattaaaaagaagcgaaaagagtttgagcaaggttatattagagaccctaaaatagatggaataccagtagtttatattcaacgagataaaaagaatttatatgtaggtaaatccacagatatttatggccgtttcattgcacatttaaatgatgaagataaaacattcaaggaagttattgtgataaagagtgatttatttaatgaaagctcaattaaacatattgaaacattattaattgaatatttattagcggatgaaaaatttaacttactaaataaagtcagaggacaaaaaattcattcctataatggaattgaaaatgttgaaaatatgtttggagaaatttgggctcagttaatgaaagaaggtatagctagtgagaatttaggtgagatacataataaatttatttataaatattcaccatttaaagagttatcggctaatcaaattgaggtttgtaaagacatttttaatacaatgcttactacatcaaatagtcgacatttgattacaggggacccgggtactggtaaaacaattgtattaacaaacatcttatatgcgcttgcttatgacagtgaaactggtaaagtgagagagggattgaattataaggatatagcacttgttgttccacaaaatcactcattaaatttatataagagcttgatgaacaaactaggtctacaaagtattacagtactgtcaccttcacaatttattaagcaggcaaaaagtagggacacaaaatataaatatgtttttgtggacgaagcacatcgtctaaaacaatattttggtaaacaagcacgtgatttaaaacatttagtcaccgataatggttatacaactgagttggaattaatagaaacatttgcgtatcacttaactgtggtttatgatccataccaaacaattcgaccagcagatataaatacagatgtattccagcagttgacagcaaattataagaggcatcccttacataaacaattccgtttaaaatctggagatcaatatttagcatggcttcgtaaatatttacaaatagcaaataatgttggagtgtatgaagaagggttattgcggggctatgattttaaggtaatagactctattacagaattgaatcaatctatgaaaatgttaaatgaaaaacatgaattatgtcgtgtagtcgcgggttattcttggaaatggattacacagaaggacaaaaatcattatgatataaaagatcctgttacaggtgagacattcaaatggaactcaaaggtaaaaggttggattaactttgagaatagtatagaggaaataggatgtatacatactacacaaggtgcggatttaaattatgttggtgtgattttaggagctgaaattgattgtgattacgcaggtgaagaaaatggagactatgatttaaataaggctaagattgtagtgaatccaaaagaatataaagatcgaaacggtcttccaattaagggaacagatataaataatgaggagttaacatcctatattaaacgtatttattatgtattattatctcgcggaataaatggatgttatgtctatgcagtaaatcaaaatatgcaaagatatttaaaggagatagcaaaagtaagtcaataattatgaaaaggggttacctttaatgtggtagtccctgccaattagatagcattttataagtatttaaagagccttactacacataaattgtagtaaggctcttattatctctatagaaataaggattagaaaataacttatcccctcggaagaaaaaagactttattttaacttccctattgataggttaacacgataattcccatattttaatagtcgacctagaaagttatccaattcttcattagaagaaaaatgtgtttttaataaataacatccttcaccacttacacgatgtacttcagatatttcttcttctttttgaaagaaatccataaattcttgatgattagctgatgtgacaaacaaagtaacaaatgcagtcacggtttgtcctagtttgattcggtttatagcgattgtatattgttcaataatccctaaatcctctaatctcctaattcgatttcctacagcctgcccagtcatatgtattttttgacctagttctttccattgtattcttgagttttctcctaataatttcagtatctcaaaatctgtttgatcaataatataaaccaatcctttcatcgtgaaagtagaaaagcagaaagtgtttcgccaacttattcagcttatcgatacaattcactatactaagtttatcctcttacatcgcattgtttattagttatatttacttataacacagaggacgcaacaaaaaaatacatctagatttaaaggaggttacaaatatgttattacaagatattttatcattcaatgaaaaatttgtagaaaataagaaatacgccccccgtgaagcaacaaaaatgcctaagaaacgtatggttgttgtttcttgcatggatgctcgtttaattgagctacttccaaaagctttagatatacacgatggagatgcaaaagttatcagaaatgcaggtggtaagattgcttctcctttcgatagtgttatgcaaagtgttgtagcatcagtatatgatctaaatgcagatgaaatctttcttatcggacaccatagatgtggtgcaagccaaactaatcccaaaggaacacttcaaaaaatattagatcgtggagtagcttcaccagaaattttagcagcaattgaatatgctggtgttgaccttgaaaaatggctatttggattcgatgatatctgtgattcgactcaagctaatgttgatttagtaagaaatcatccacttattccaaaagatgttcctgtacatggtttagttattgatcctcacacaggtaaattagatgtagtagttgatggatataaaacattaaatggtatgaaacattaatcattacttaaatgaagggaagttattaaatatgaatagacaagaagctacgcaaaaaattatggaagcaaaaatcgcaaaaggtttaacatgggaagaaatttcaaaagtaagtgaaaactctgagacttgggttgtaacagcattattagggcaggctacaatgacacgtccggaggcagaaaaaatcggtaaactattagaattagatgaagaagtagttcaggcattaacagtagttccacttagaggtcaagtaatgcaaatgcctcctactgacccaatcttatatcgattatatgaaatgatgttacaatacgcaccaactcttagagaattaatcttagaaaaagctggtgaaggtgtaatgagtgcaattaacttcaatttaggtgtggatacacaagaagatccaaaaggtggcgatcctcgtatcgttattacacttaatgggaaattcttaccatttcgtgcatggtaattaattaaaaatctatctatacaattaaattgattttacagatttacaaaatccatcctttttaatctaactgtgtagaaaggatggatttttactatgagattctttttcagtaaaggagaataatatgaataaaaaatactttaatacaagctttagtattctacagtggtttgtgtttctattagcaaatgcaattgcattgcctatcattattggtggcatattccatttatcagtagaagatatttcaacattaatgcagcgaacttttttagtcgtgggaataagttcatttatacaagcatggtttgggcatcgctatcccatagcggatggtccagccggttcatgggtaagtatatttgtcatactgggacaagttgctatgcatcagggacaaagtgcaaaagacgtgttgcaacttttagaaggtgggttaattattgcaggtatattactcttcgttcttggtataacagggcttgttcatcaaatcttacgtttatttactcctttagttacagggacatttcttttaattttagcacttcaacttagtggtgtgttactaaaaggaatgatgggattacaaggatctgcaactcatcctgattatccaacagctattattgcgctctttgtttttgcctttattactttcttatcaattaaagggacaggatggatgaaaaggtacgctgtgttacttggaatttcatgtggttggcttttgtatactcttttaggagaatcatcttatatgcctacacatacaacgctagttaagttaccagagatatttgcttggggcacacctagattggatattggaatgaccctaactgcaactttatttacatttcttttagttgcaaatacaattgctgctatttcagctgtaaaacaagtagctcccttatctaaagaaaatgaaaagcaaacattgaaccgtggtgtatgggtcggaggtatatcacatattatctcgtcgttgttttctacaattggtattgtaccattacctgcaacagcaggatttattcaattaacaggacaaagaaagttgaagtcgttccttatagcaagtcttatattagcaggaatttcttttgttccctcaatcgtaagctttatatccttgcttccaggccctattgccaatgctgcacttttagcaacatttgtccaagtaataggcatttcatttcaatcaattttaagcgaagaattaaatcaacgccgattaacaatattaggaattacattattaatcagtttaggaataatgtttcttccagaaagcgcatttagtggcattccttcttccttacaatatgttttaaggaatggattgctcgtgggtaccgtgattgtcattctattggaacagttttggaaagaataaagtatttatatgcttttttatttggaagaaaataaagaatgaaaatcagcatttggaaatattttaaaatatcttgatataaacctatgtattttgtaatatataggtatattgttagtttatttgattccgttcattcccacaccttatgtgttgtggttgagttgtagaagtaagtttttttcttactttaattttgaaagggcttctttgagccgattagtgtaattagcttattttgctatgcacaattaatcgacttgaggaggccttttttgtttgggtttaaacaggtataaatatatatttctgtataaaacaacagattaagataggaaatttatatagggggagaaaacatatgagtaattgatttgtttatcagggaaattggagggatatgtagtttttttacgttaaatgtatacacggatatatgaaactgtggttgtaaaatagatacataatagatttacgaatcgcagcaaaaataattatatagaagttttgtagacgacataaatgtactcattataagaaggatgaatagaattttactgtgaatttttaaaaaacgcatcaattgatacgtttttttattgtaattctagtaaatatgaggtacgatttgaaaggggaaagaattttaatgcatattagctttcaaaatagggagacaaaaaagcacactaattttacaatcggggagattgagcagtacatattagagtttaaagaattaattaaaaataatcgatttacggtttctcgaaatgaaaaaaggaaagagaatagtgaatttttagaggctaataagattaacgctagtaaagtgaaagagattcttcttaatataggagtacgtgatttttgttatgcagttgataataaaaatccaaattttgctcatgaaaaattgtatatcttttgtccacaatatgagttagataattggggacaaaagaagtcggtagacatatatattaagatgaatctaattgaaaataagaacaggaacaaatacatgattgttgtttcttttcataaaaggaataaaccagtcacttatctttttaggtaaagataagtgactaatggttttagaatgagggaggatttttatgttggttttatgtgagttttgtcgagatatggtaaagtattctactaaagatgtttcaaaagtgacagtcattagagggaagcaatatcattatgtaggtaaagaagcaaattgcgaggagtgtaaatctgaaatatttgttcctaacattcatgattataatttagaacaattagatcatgcctatagacaacaggaacagttagttactatttctgaaataagagaggttttagaaaaatataagattggaaaacgtccattgtctttacttttaggttggggagaggttaccctaacaaggtatgtaaatggagatattccgacgaagcagtactcggatatattgaaaagattaggtagagatcaatcttttatgctagatattttggaaagaaataaagatttaattactcaaaaagcatatagagtctctaaagaagcaatcgcgaagctacaggaaaatgatgatattccttctacgcagactacgaaaatcgaggaagttgctaactatttgctatataaaaatgatgatattactcctttagctcttcaaaagctgttatactatgcgcaaggattttgtaaggtgcttactgggacatatttatttgaagatgattgtgaagtaggaagtcatggcccggtatatcgagctatttttaataaatataaagtatatcagtacgacaatcttgaagttaattatgatagtacaaatcaattaactcaaatagaaaaggaaatattagactgtgtaatcaatactttaggttgttatagtgggaagagtttagaaaaaatgattctatttgacttaccatgggaagttgcgcatctagaattagaagataatgatcccggtaaacctattatggaaaaagaagagatagataattgctttaatacaatgaaacaggcatataatttagttacaatttctgatataaagaaatatggcataaaagcatttgaaaatataaacaattcaatgttgtaactatatcatttttaatatgattgatatatgaattttttactgttaatcaggcctctataaaggtattaaaagatagtactaattacaaaaggttaggattgcagaatataaacattattaacacgatgtaaatatgcatattaaataaaaagtaaagtggattgatacattatatggtaaaatgatatatatgaaaacgtcttatgaagtaaattttacgctttggacctttagctcagctggttagagcaaacggctcataaccgttcggtcgtaggttcgagtcctacaaggtccacttataaacaaggagaaagcactcaaatgagtgctttctccttgtttataataaataaaggggattgtgacatgaaaataattgatttagagacagaaagaaaaaagaagggaaaattaatggtaactattccaattatagaactaatatatggagaaaaaggggaaattgaatttaaagtagtgggaaaaaaagttgttccgcaatccatgttagagaattaaactactttcaatttctataggctgtaaggtcgttaagtgggagatttctaagtacggaaacctcgtggattttgattgattatgctatccctgtagttcctaaggctaagagatgagttttctccgttagtatgggagaaaaaggagaaaggaaaggacatagctattgcggttttagatacgggttgcaatattaatataaagacgttattctttcctatgatttttcagaaagaataacgcctttttcattttagagggtattttgtcttgttagcttgatagcgatagggtagcgccatcaaaacgcaaatttcgtacgctaagagaatttggaaagagctaaggttctgattcccttaaaggacaaaacgaaggagaattcctaacaataaagttgtatttacctaggaaaattaatatgctctgaactaagaggtaagatatttgccaaccttcttcatattttttgtagctggagttaaatacaaaatattacagaagtagagacaacattgataattagatttagcccactggtgcgttgtaactagtctaatagtaatctttctcgaagctcactgtattatcgaaaagaattgcgcatgctaatgcattcattgcttattctttagtttattgaatataatgatcctatttctaaaatagaaggatgataggatcaattacttgtcactttaaatttaattaaaaaacaattgtactaacagcatgtagataattgttccacctgctatggagagaagcatttgtctcttccatatgtgaaggattattactactcctactgaaattaattctggagcaccatgattgccggataataagttcagatccttaaaacagtaaataactaaaagacttatgacagctgaaggtagtaccttaccgagatactggacatattgcggagtaggtttatctgatgggaacactaagaagggaaggaaccttgtaatcattgtgcctaaaaccactataccaactgttataacttgttgcagtaaactcattgtcacacggaaacctcctctatgttctctattggtttttttaggatagtaagtactaataaaatcataatcattgcaggaattatgaaattgtttccaccaaaaataattaggctaaatatcgataatcccagtcctacaagagcgctataatgctttttctccctcatccattgttcaacaaaaatcacaacgaaaagtgctgtcataacgaaatctagtccttttgtattgaagtgtacaagggaaccaaaaataccaccaattgcggctcctataccccaatacaaatgattaagcagtgtcacgaagaacataaaccaacccttatcaacaccttttggaatatcaacagtagaattaatagaaaaagattcatcacatagtccaaaaataagataaaactttttcttaccagttcctttatacttatctagcatagaaataccataaaataaatgccgtgcattcaccattaaagtaagaaaaagtgcatgaattggattaaaagcaaccagtaataaattagctgcaataaattccattgatcctgcgaatatgattaaactcattagaattggatatattgcactgaaacccagagagttcatgtagattccataagcaattcctaaaaatacaaaaccagcaaaaataggtattgtataaggaaaagctgcacggaatgcgattcttatttgatttctatttttcatattattcacatccttaatcaagagctttattgcatacaaatttaacacataaaatccatacaatgaataagaaaattgtatgtattacaattttctttagcggaagtgtgttattctaactttaaaataatgctgagtttttatccttgtaatacttttcaaagtttataaatcttaattttaactattaaaatttaccctataaaaatttaatcgtagaggtgaagcatgccagtaaattcatttgaaaattactctatgtcttggaaacctaataaggaactattaaagcgtccgttttattcctctattgcagcactacttgaacatgatattgtaaatggttttttagctccaggaacaaaattgcctccacaacgagaattagcagattttttagatttaaactttacaacaattacccgagcttacaaactatgtgaagttaaaggcctaatttatgcaatcacagggagtggaacttttgtagctcctaatgcaactcgttccattactatttctacagaggaaatcagaaactgtattgatcttggattagtagcatcatttgagcaaactaatagtattgtcgcagagactattcaaaaggtcgtagataaacagtatttagagcaactattaaattacaatgatccaactggtcttccgcaccaaaaaacggcaggtctcaattggatgaagtctttcggcattaatgtggatcaggaccatatagcaatagtttcgggggcacaaaatgctttagcaattacattgacagcgttgtttaaacctggaaaccgaattgcaactgatgtatacacctattcaaattttatcgaattggcaaaaatgctacatattcaattagtacccattcaaggggatgaatttggaatgctcccaagtgaactcgataagcaatgtagtcaattagatattcatggtatttttttaatgccttcttgctctaatcctactacgattatgatttcagattttcgaaaaaaagagttagcagcaatcattcgaaagcatcaaataattttgattgaggatgatattcatgcatttttgacagcaggggttatttctgattatgagcaaccaatgtttaatttacttccagaacaaagtgtttatattagtggaacttctaagtgcatttgttcaggattaagggttgcttatatggtattcggagatgccttacgtaaggatattttaaaggctatatttaatgtcaatgttaaaacatcttctttagacgtagaggtgataacagagctagtgttatcaggaaaagctcatgaaattgttaagcagaagaaatttttagcagagtctgcaaacgaaatttattcaggatatttttcttccaacaagcctgtagggcatccttttagtttttaccgttggctacctattcaaaatcattatgatgcatttcaattagaaacagatttggagaggcacggcattcgggtttttcattccgagcgctttattacagcacaaaccatgcctaatcagtatttacgagtcgctctatcctctacaaactcattagaagagttgaaaatagggctagaaatactaaaacaatatctcggctagtgtgaactacccgccacttaacgtcctaacggactgtttgaagtgggggcttctcggttagtcgttacttttggtagctcccttggatttataggtacatcccgtccctaaaaacctaacttaatcatacgagggagatgttcaataatggaaattagaaaaaaattagttgacccaagtaaatatggtacaaagtgtccgtatacaatgaatccagaattcattacagtccacaatacgtacaacgatgctacagcagaaaacgaagtagcttatatgattcgtaatgacaaccaagtatcgtttcatatcgcggtagatgataaggaagctgtacaaggaattcctttagagcgtaacgcctggcatactggcgacggtaacgggaatggtaatcgtaaatctattggggttgaaatttgctactctttaagcggtggagatagatattataaagcggaagacaatgcaactatcgttgtagctcaactaatgaaacagtacaatattccaattcataaagttcgtacacaccaatcatggagtggaaagtactgtcctcatcgtatgttggcagaggggcgttggaataactttattgaaagggttcaacatgcatataatggaggtagtagtctaattaacctaactcctactccatctttcagtggtgaaacaggtattgcatatatcggaggaaatagcgttaatcttcgtaaaggtccaggtactggatacgggattattcgtcaattagggaaaggagagtcctacaaggtatggggacaatcaaacggctggttaaaccttggtggcgatcagtggatttataatgattcatcatatattggttatagtggagaaagtacaccgacaactgcacaaacagtcaatgatggggtaggagtagttaccattaaagcggatgtattgcgtgttcgtaaaggtccaggaactaattatggcattgtaaaaaatgtgtaccaaggggaacagtatcaggcgtggggatatagagatggttggtataatgttggaggagaccagtggatttcaggtgaatatgtgaaatttgaaagataaaacatattatgtaaaagcaaatgcaacctatgtgcatgtgaagtaagagagaagtcggtccttatgataggaaccgactttttttgctaatatgtatctttaaaattctgaaaattatgtagaaatattcttttttattcttttttctacatttttttgttaccctttaatgtaagactattcagaaagaaggaagtgattttatgaatgctccagtgaaggggaatgaacaagttacgaaattacttaatgactggtatcaagcaatgttaacacaacagtatgtaaaggcgtcaaacttgaaagaaaaaattgatcatttaattaataatttacagcatgaaaaagacacagaattacaagaccaaaacttattattatattactctctactagattttaggtataaggttctaactgaaggtattaatatttcaccaagtgaatttgatgaaattgagaacttcaataaaccagtagacaattatttagcgtattactatcacttttataaagcaatacataatacatttttgtctaattatgcagaggctggggaacaatttgaagaagcagaatcacttctaaaatatgtccctgacgaactagaacaagcagaatttaattaccgtttagcaacattctactatcaaacatataagccccttccctctatagcgtatataaacaaagcaaaaacagctttccataataatgaaggctatgagataaacgtagcattatgtgaaaacgtactaggattaacatgtatacagataagacaatttgaacaggctgaagaacacttaaataaagcgatagatattgttaaaaagggtgataacacagaactgttattacgtcttagaaacaatataggatggttatatgctagccaggggctttcggctttagctatccgccacttatcagaaataactgaacatttaccgaaccattataaggctatctttctacaagctaaggaacactataaattgggggaacatacagcggccaataggctaatagaacaggggttaagaacgtctactaaaatagggaatcaagagtatatacacagatttaatatattaaaggaattgaataacaaatctgatttaaatacattagaaagtgtaatagaagcaggaatttcctactttgaagtagaagggttaacaaagtgcgttcaagaatatgctgaaattctcgctactatgttttataaagaagcgaacgacaaaaaagcaagtaaatacttttatatcagcaatgaatcaagaaaacaatttgaagaaaaaggggcgttagtgtgatgaaaaagttaaagtcagtattattacttcccattatggcagtagggtttattgcaatggctgaaggggatacacctgcaccacaaagacctgatttagcatatggtgaggggcatattagtggtataagtaaattagaagcacacggggatcatggcggtgcacccgcttacgaccacggaagaccgcctgcaccagcgtatgaatatgtgaaataacaaaaaagccaactttatttatataatagggttggcttttttggtgctatgatgtttagaatttacttttagataatgcctttaatatcggatttataattctacttattaaacgaaatcccttgaatatagagctaacaactttcataatgttagaatctctttttattttaaacacctactttcgcaattccgcttgtagaataaagttttcttttatactacctttatatgtataccttattttattcttttgataaacctttgtatgatctttgctaaatactgtttcgtcactaagaccaagttcttgtttaactaaattacgttctccaaaactcaatgaatcatctaccgttcctattaataataagaaagcgaatttgaaatctttttgctcagtaaagaaagcatttggtgtcatagctagcgaagcctttttaatatgtttattcttatcggtgtctaagaagataaaaatattatttgataaaccgattgaggttctgccatcttctaatacttcagttgaattaattttcaactttgttttttctcccatttcttttaatgctttttctattctttgtttgtattcatctactgttaatttagtttctttattttctgcaatcgcaggtttagtgctatcctttttattgccactaacaccagcagcaacaaaaattattaatagtgcagtaataatccaaacccaccattttttataaaacggttttttcatataatttccctccatagatttatacctaaatcataccaatttcatgcaacaactgtaaatggttaagtttctggtttgttgacaaaacagaacgattgttctattatttttatacaaacaaacgttcttgtggaggtcatcttatgaatcatttacttaaatgctctttcaatcaaaaaataccaattgaattaatatatttaaacggttcaggagatttctctcaaaggactgtgattgttagaaaagtatatgaagatcgtatattggtgtattgcatgaaaaaacaacaagttagaacactgaaattagctaatatactatctgttgataaagtaagaaataactatcaatacgcttaaaacacttaatgaggtgattatcatatggcaaacggagtaccaaaaccaccaaagaagaaaagtgcttcaaaaaaggaacctagaccatacatggatgaattcgaacagcaagaagctgctgaattaattcaatatgcaaagcaggatgatacagaattagtctttactgtgtatagaaaatataaagaaccagatatcattcaaggaaaaatcgttaaacttgaacaacaaatgggtagaattgtagtgagtaatggcccgaatataatacataaaattcaattcatggatattttgaaaatcgaaacgcctagttaatttagctaggtgtttttatatggccataaattctttatcaaagtagaacttgtccattaagttgtttacaattccgttgaaataagcgaatttacccttgttcatttttgttcccgctttaattttcataacaaactctttgatagcttgtaagccaatagtaagttcctggtctttagtaaatgctttatcacctgttatatggttaacgattttattacactgtcttacgaccttccacagttcttgaattgttttagattcactgtaaaaagagccaactaaagaaataaaacgctctggtacccaatgagcaacaaagtcagcttgttccatattctcttctggagtattgctattctcattactattacgtttatttatatcttttatattttgttttaaggaaatagattttgttttattggtgtgacactttttttcatttttaacaggtgcttgtgtgacaacctgttcctccacaatgattggttgaataacaatagcgttacatgtttgtctcatatcgattttacgcttcatttctagctgtttaataatacctaaagactctaggtgtaggcatactctaataaccgttctacggctaatattaaggtcttcagcgatgtgttttttcgttctgaaagatacgccaaagaacttagaagaatagttgtgtaatttatttaatacagttaattgagttttgtttaactgatcggcgaatttctctttgtacgcccgaacagttttatttaattcatcaatagttttgaatgttgctagatttttatatgtttcattacctgcaataattgtaattccttgtttcttttccatagtggtttgtctcctttttggaaacaaaaaagcaacgtcaccaatttggtaaacgttgcttaatagaccctgcatgatgtaaaatagctcatgagagtatagcaagtgtttacctggcctaatcaggtggacggtatatagagtgttcgtagcactttacatacacgctgtgctcttttgttttgtgtagattttgcacgctgaaataattttgcatgaattttgcacgattacttctggaaatctaaaggagccttgatataaaagggatgttttactattagttcgaatccctctgggcgcgtcaaaaagtcctaacttacgttttgtaggttaggactttttttatttacctcttgttatatctagtaataagatttactattagtacttgataataatttttaattttattattttctttcaatattattcaaatttcggttgtaagttgtaaatctcattaatacatataaattaataatattttggaatgggtgtctgcgtgaggattctccttttaccaaacttattgtacaatagaaacaagggggagattagtttgaaggcaagtcttttacaagaacaaagcttacgtttggcaatgacacaagagttaaggcaagcgattacaatgctccagtataatgtacaagaattatcggagtttttgtatgagcaatcgttagagaatccccttattgagttaggtggttttgagagggagaagaaaaagagctctaacaacagtaaaagtaccagcaaacaagtcgagaatcagatggagatctacagtgtggattctacaacgattcagcaacatttattaaatcaaatacagtattataaaatagatgaagaagagcgaaaagtagcttctttcattattatgaacatggatggaaatggatatttacaagaaacgaatgaagagttagcagagctcctttctgcacatattcatgtagtcgaccgttctgtagagcttgtccaatcactggagccagcaggggtaggggcgcgtaatattcaggaatgtttaaccttacaattgaagcgcttacaaagacgtaatggattagcagaagaggttgtagaagatcatttcgcttattttgtgaagaaagattggcgaaagctcgttcaagtgttgaaatgtagtaatgaggaattgcagagtgcggtaaattgtataacgtcattacaaccaaaaccaggtcttgcgttttcttcagataaaccactttacattgtacctgatatggcggtgaaaaaagatggcgatcgcctcgttttacaaatgaatgagagaaatatgccgagaattgaaattcattctgaatatagtgcgcttcttaataatagtgaaagtgaagtagcatcttacgtatcagaaaagtatcagcatgtgcagtggattatgcgcagtttgaagcagagaaaacagacattgctgcaagtaatgactattattatggaaaaacaacgtgatttcttctggaaaggtccagagtatttaagacctctcgctttaaaagaggtagcggaagagttaagtgtgcatgaatcgacaattagtcgtgcgacgcgaaataaatatgtgcaaacaccacacggtttatttgagatgaaatcgttctttagcaatgccgtttcgacgactgaagatgaagcagtttctacaaaacgtgtaaaacaatttattcaaacgctaattggggcagaggataagaaaaagccactttcagatcaaaagatttcaaaattattagaagaagagcatgaaattgttatttctcgaagaacagtggcgaagtatagagaacaaatgcatatcccagcttcgtcattacgaaaaacgatcggataggtgaagaagatgaaagttgtactgtatactaaaaaagattgtggcctttgcgtgaaggcgaaacaagttttacaggaagtacaatgtgaatattcttttcaaatcgaggaaatagatatatatgaagataatgaccttttagaaaaatatcacttaatgattccggttgtagaaatggacggaaaacaagtagaatatggtaacattcacaaaggtgtcataataaactatataaagaatgcagttaagagttgaataagtttctatctcctgttacaataatacacgtagcagggattatttttttaacctatgtgggacacaaaatgtcactacgggacgtaaagtgaccacgagggaaaatgaaccgatgtagtgaggagaaaagatatgcgctcatggattcagaatacaaaaaaattattacctgatctgctacctgttatgcaaacgagaatgcaaattcttcaatacattaggctcatgcagccgattggaagaagaaacttatcagcaagtctcggtatgacagaacgagtattgcgaagtgaagttcaagttttgaaagaacaaaacttagttcacgtcgcttcttctggaatgactttgacagaagaaggaacagctttagttcttgctttggaagactttatgaaagaaatttccgggttaaaggttttagaaaagcaacttaaggaaacattagacttggatgaagttttcgttgtccctggtgatagtgatgaatcaccttgggtcaaactggagatgggccgtgcttgtgtgacttgtataaaagaccgtctgacagcgaataatatcgttgctgtggctggaggaactacgctagctgctgctgcggacatgatgcaacttgattgcaaagatttacatatgctatttgtcccagcacgtggtggaattggagaaggtgttgaattagaagccaataccatttgtgccaagatggcgcaaaatacgatgagtaattatcgcttattgtatgttccagaccatgttagtagcgaagcatatgcgtctattgtgacagagccttccgtgaaagaagttcttgagttgattcgatcttccaatatcgtcattcatggaataggtgatgcgttaacaatggcacgtcgcagaagtacttcagaagcagattggttaaagattcaggcaagcgaagcagttggcgaagctttcggttactactttaatgaagaaggaaatgttgttcataaagtaagaacggttggtatgcaactagaggacttacaaaatgtatctcacgttgttgcagtcgctggaggttcttcaaaggcaaaagcaatacaggctgtaattaaacaagggcacacttcaattctaattacagatgaaggtgcagcaaaacagttaacaaagggttttaccctttaatataatcccccaaggaggaaattcaaatgactaaaattggtattaatggatttggacgtatcggacgtaacgtattccgcgcagctcttaacaactctgaggtagaagtagtagcaatcaacgacttaacagatgctaaaacattagctcaccttttaaaatatgacacagttcacggaactttaaatgcagaagtatctgctaacgaaaacagcatcgttgttaacggtaaagaaattaaagttatcgctgagcgtgacccagctcaattaccatggagcgactacggagtagaagtagtagtagaatctactggccgtttcactaaaaaatcagacgctgagaaacacttaggtggatcagttaagaaagttatcatctcagctccagcttctgacgaagatatcactgtagttatgggtgttaaccacgaacaatacgatgcagctaaccacaacgtagtatctaacgcttcttgtactacaaactgtctagctccattcgctaaagtattaaacgaaaaattcggcgtaaaacgcggaatgatgacaacaattcactcttacactaacgaccaacaaatcttagacttaccacacaaagatttacgtcgtgctcgtgcagcagctgaaaacatgatcccaacatctactggtgcagctaaagctgtagcattagtattaccagaacttaaaggtaaattaaacggtggcgctgtacgtgttccaactgctaacgtttctctagttgacttagttgttgaacttgacaaagaagtaacagttgaagaagtaaatgcagcattcaaagcagcagctgaaggcgaattaaaaggtatccttggatacagcgaagagccattagtatctatcgactataacggatgtacagcttcttctacaatcgatgcattatctacaatggtaatggaaggtaacatggttaaagtactttcttggtacgataacgaaactggttactctaaccgcgtagtagacctagcagcttacatgacttcaaaaggtctttaattcttaattatataagttatcaatgacaaaacgagggagagggtttgttccctctctctcttctttcgttttaaaagcaaatgtgttaagcttttgagtgggttttgtcaatcctaactagtagtcggagggaaatccaatgaacaaaaaatcaattcgtgacgtagatttaaaaggtaagcgtgtattttgccgcgttgatttcaacgtacctatgaaagaaggcaaaattacagatgaaactcgtatccgtgcagctcttcctacaattcaatatttagtagagcaaggtgcgaaagttattttagcaagtcacttaggccgtccaaaaggtcaagtagtagaagaaatgcgtttaactccagtagcagcacgtttaggcgagcttcttggtaaagacgttaaaaaagcggacgaagcattcggaccagttgcacaagaaatggttgcagcaatgaacgaaggcgacgtattagttcttgaaaacgtacgtttctatgcgggcgaagaaaagaatgatgcagaacttgcgaaagaatttgcagcacttgctgacatcttcgtaaacgatgcattcggtgcagctcaccgtgctcacgcttctacagcaggtatcgcagactacctaccagcagtatctggtctattaatggaaaaagagttagatgtacttggtaaagcactttctaacccagaacgtccatttacagctatcatcggtggtgcgaaagtaaaagataaaatcggtgtaattcgtcatctattagacaaagtagataacttaatcatcggtggtggacttgcttacacattcgttaaagctttaggtcatgaaattggtctatctctatgtgaagacgacaagatcgaactagctaaagaatttatgcaacttgcaaaagaaaaaggcgtaaacttctacatgccagttgatgttgtaatcactgaggaattctctgaaactgcaacaactaaaatcgttggtatcgactctatcccttctaactgggaaggcgtggacatcggtcctaaaacacgtgaaatttatgcagatgtaattaaaaattctaagcttgttgtatggaatggaccaatgggtgtattcgaaatgactccattcgcagaaggtacaaaagcagtaggacaagcattagcagatgcagaagatacatactctgttatcggcggtggtgactctgcagcagctgttgaaaaattcggtatggctgataaaatgagccacatttctactggcggcggtgcgtcattagaattcatggaaggtaaagagcttccaggtgtagtttgtcttaacgacaaataagtagcagccaaagaaaaaggacggtgcaaagcatgcgtaaaccaattatcgcaggtaactggaaaatgaataaaactctatctgaagcagttagcttcgtagaggaagttaaaggtcaaatcccagcagcttcagctgttgatgcagtagtttgctctccagctctattcttagagcgccttgtagcagcaactgaaggaactgacttacaagtaggtgcacaaaacatgcacttcgaaaaaaatggtgcattcactggcgaaattagcccagtagcacttagcgacttaaaagttggctatgtagtacttggccactctgagcgtcgtgaaatgtttgctgaaacagatgagtcagtaaacaaaaagactatcgcagcatttgaacatggtttaacaccaatcgtatgttgtggtgagactttagaagagcgcgaaagcggaaaaacatttgatctagtagcaggtcaagtgacaaaagcacttgcaggtttaacagaagagcaagttaaagcaactgttatcgcttatgagccaatctgggctatcggtacaggtaaatcttcttcttctgcagatgcaaacgaagtatgtgcgcacatccgtaaagttgttgcagaagctgtttctccagaagctgcagaagctgttcgtatccaatacggcggtagcgtaaaaccagaaaacattaaagagtatatggcacaatctgacatcgacggcgctttagttggcggtgctagcttagagcctgcttcgttcttaggtcttctgggggcggtaaaatgagaaagccaacagctttaatcattcttgacggtttcggacttcgtgaagaaacttacgggaatgctgtagcacaagctaagaaacctaattttgatggttactggaacaaattccctcacacaacgcttacagcttgtggcgaggcagtaggtcttccagaaggtcaaatgggtaactctgaggttggtcacttaaatatcggtgctggccgcgtagtatatcaaagcttaacacgcgttaacgttgcaattcgtgaaggcgagttcgataagaacgaaacttttcaaaatgcaattaaaagtgtaaaagaaaaaggtactgcacttcatttattcggtttactttctgacggtggtgtgcacagtcacatgaaccatatgtttgctcttcttcgcttagcagcaaaagaaggcgtggagaaagtttatatccatgcattcttagacggccgcgatgttggaccacaaacagcaaaaggttatatcgatgcaacgaatgaagtaattaaagaaacaggagtaggacaattcgcgactatctctggtcgttattactctatggaccgtgacaagcgttgggatcgcgtagaaaaatgttacagtgctatggtgaatggtgaaggccctacttataaatcagcagaagagtgtgtagaagactcttatgcgaacggtatctatgatgaattcgtattgccgtctgtaattgttaacgaagataacacgccagttgcaacaatcaatgatgatgatgcagttatcttctataacttccgtccagaccgtgcaattcaaattgctcgtgtatttacaaacgaagacttccgtgagttcgatcgtggtgaaaaagtacctcacattccagaattcgtatgtatgacacacttcagtgaaactgtagatggttacgtggcattcaagccaatgaaccttgataacactttaggtgaagttgttgcgcaagcgggattaaagcaacttcgcatcgcggaaactgaaaagtatccgcacgttacattcttctttagcggtggtcgtgaggctgaattcccaggagaagagcgtatcttaattaactcaccgaaggttgcaacgtatgacttgaaacctgaaatgagcatttacgaagtaacggacgctttagtaaatgaaatcgaaaatgataaacatgatgttatcattcttaactttgcgaactgtgatatggttggccattctgggatgatggaaccaacaattaaagcagtagaagcaactgacgaatgtttaggaaaagttgtagaagcgattcttgcaaaagatggtgtagcacttattactgctgaccatggtaatgctgatcaggagttaactgctgatggcggtcctatgacagctcatacaactaacccggttcctttcatcgttacaaaaaatgatgtagagcttcgtgaaggtggtattttaggagatatcgctccaacaatgcttacacttttaaatgtggaacaaccgaaagaaatgacaggtaaaacaattattaaataatttgcttatataaaaaggagagaatttattatgtcaacaattattgatgtttatgctcgcgaagtccttgactctcgtggtaacccaactgtagaagtagaagtttacacagaaagcggcgctttcggacgcgctatcgtaccaagtggtgcatctactggtgagcacgaagcagtagaattacgtgacggtgacaaatctcgttaccttggtaaaggtgttgttaacgcagtaaacaacgttaacgaaattatcgctccagaaatcgctggtttcgatgtaactgaccaagctggtatcgaccgtgctatgatcgaattagatggcactccaaacaaaggtaaactaggcgctaacgctatccttggtgtatctatggcagtagctcacgcagcagctgacttcgtaggtcttccattataccgttaccttggtggattcaatgcaaaacaattaccaactccaatgatgaacatcatcaacggtggttctcacgctgataacaacgttgacttccaagagttcatgatcttaccagttggtgctccaacattcaaagaatcaatccgtatgggtgctgaagtattccatgcacttaaagctgtattacatgacaaaggtcttaacactgcagtaggtgacgaaggtggattcgctccaaaccttggttctaaccgtgaagctttagaagtaatcatcgaagctatcgaaaaagctggttacaaagctggcgagaacgtattcttaggaatggacgttgcttcttctgagttctacaacaaagaaactggtaaatatgaccttgcaggcgaaggccgtactggcttaacttctgcagaaatggttgatttctatgaagagctttgcaaagacttcccaatcatctctatcgaagatggtttagacgaaaacgactgggatggtcacaaattattaactgagcgtatcggtgataaagtacaattagttggtgacgatttattcgtaactaacactcaaaaacttgctgaaggtatcgaaaaaggtatctctaactcaatcttaattaaagttaaccaaatcggtactttaactgagactttcgaagctatcgaaatggctaaacgtgctggttacacagcagttgtatctcaccgttctggtgaaactgaagatgctacaatcgctgacatcgcagttgcaactaacgctggccaaatcaaaactggttctatgagccgtactgaccgtattgctaagtacaaccaattattacgcatcgaagacgaactaggcgaaatcgctgtttacgatggtatcaaatctttctataacatcaaacgataattgtaggaaataaacgacagaccgtgagaaatcacggtctgtttttttatgctaaaattgttcacccgtcataagtgacatgaaatgtttgaagaagcggttatagtcaaaatcaattgcgatttgatgaaccggccaatcaataaatggcttctggttcactagagaacgaaattcccctatgcttgctccttgtgcagaggattctgtcatgacaacaataggtgatttatgatacgtgaacatagagttatcaaataaagcgagtattggcattgtgtcatggaaggggctcccctttaaatgtggtagggcgtctttataatatccgtagtaataatgatcaaataacggtttgacaagtggagcttttccttttgcctcaatgtattctgccatttctggtgtaatgatggagtattgagtgacgtttaatgggtatatgtacatgttaactgcggattgaaggactatattagcagcagtaggatcgccataaaagtttgcttcggaaataggggtaacattaccaggatgtaaaaaggcaccgcccattacgtagtaagatttaatttgtttcattaactgtttgcacatgataaacaaaattgctagggaggtaagtcttcctaaactcacaatgattaattcatctttatactgttcaataagaggaatgacttcaaaaaaattctccatttctccgttagtcacattcacctttggaataattggaccgagcccctgtttcccatgtacatccgtaaaaaacgcaggtgaggcaccagtaaggggacgttctgaaccaccgaatatcttgatatttctattctttgtttcgttattaaaaaaatgagcattttctacggccgttttttttggaacattgccgtaatcagcaacgataccgacgatttctatttcatcgataaagaatgctaagaggagagccatcgtatcatcaatcccaggatcacaaaaaatgagaacttttttgggcatatgttcaccacctatcttgtttatccggtacaaatccgcttggtgagggctaataattaatggggatgaggaaaacctcaatgattaaagtttcactttatatatatgtaagtttaaggataaaaagattattttattgaaataatagtcttttaaattcagaaaataaaaactttttatattaggtcaaggtttttgacgtaattttcgtttagaaatgcagtcatatcaaggttgtaagcgtataacataggctgtttttgctgtcaagttgataaattgcagctttttacaatttatactatgataaagatattaacagaagatcgtataaacatgagggatgatgaacatgaaatttacaaagattcttgtccaaattgctgctctttacgtgttttatatggttggaacttgggtgcaagaaatgttaaatattccgattccaggaagtttgattggaatgttcctcttacttgttttacttagcctaaaagttcttccagtgaaatggttcgatttaggagcagaaacactcgttgctattatgccgtttttattaattccgccaacgcttggcctaatgaattacggtgctttttttatgagtaaaggaatttctcttttcattacagttgtagcgagtacatttttaattattattgtcgcaggacatacaggacaatatcttgcgaataggaaggaaagagagtcgcgatgagccaaatattaatcggaatcggttgggttctttttacggtgctattatatcaattatctaaaaaaatctataaattatttccaacaccattcaccattccaatgcttgtagcaactggattaatggctttcctatttatcgtgcttgatataccatatcaacattatatggaaagtggtggtggctggattgcaaagctacttggacccggtgttgtagcatttgcaattcctctttataaacaacgtcatgttctgcaaaaatatgttgtaccgattgctggcggggtattagtaggtacaacagttgcaatcgctagtgattttgcgattgcttcacttatgggaacggataaaagcttaatcttatcgtcattaccaaaatcggtgacaatgccagttgcgatgagtgtttctgagcaagtcggtggtgtaccttccttaacagcagctttcgttgttatcgcaggtattactggaacgattacaggacctcttttattaaaatggagccgtgttacaaactcagttggtaaaggtatcggatttggatgtgcttctcatattatgggtgttatgagagcgatgaaaaataacgaacatgaaggtgttattggatcggtaacaatgacattaacagcaattttgacatgtttacttggaccgttatttgcgatgatgtttatgtaatagaagaaaagcgagagcgcctctatagctctcgcttttctatagaatttatgctacagttacaataactgaatctttgtaggaggtacgccaagtgcatacgttattatcagttttacttattattgtatcgattttaatgattgttatggtacttatgcaatctagtaatagctcaggcctttcaggtgcaatttcaggcggtgcggagcaattatttggtaagcaaaaggcacgtggaattgaagcggtattaaaccgtattacaattgttttagctgtattgttctttgtattaacaattggtgttacgtacttcaatttatagaattgaaagaagaagcgttagtgaatggtactaatggttcttctttttttgttttgctatttgaaagatgtttctaattagattatagaaatacaaatatggtacactagatatagaaagaatacgactagattacagaagagaaagaggagaaatacatgatgaaattagcatctccgaaaccatttacatttgagggtggagaccgcgctgttttattactacatggattcacagggaactcagctgatgtacgtatgttagggcgtttcttagaaaagaaaggctatacttgtcatgcgccaatttataaagggcacggtgtaccaccagaagagcttgttcatacagggcctgaagattggtggcaagatgtaacggaggcatatcagcttttaaaagataaaggttttgagaaaattgctgttgttggattgtcacttggcggcgtattttctttaaaattaggttatacagtaccggttttaggtgtagtaccaatgtgtgcaccgatgtatattaagagcgaagaaacgatgtaccaaggtatattggcatatgcccgcgaatataaaaaacgtgagcaaaaatcacctgaacaaattgaacaagaaatgttggaattccaaaagacaccgatgaatacattaaaagcattacaacaattaattgctgacgtacgtaacaatgtggatatgatttatgcgccaacatttgttgtacaagcacgtcatgacgaaatgattaatacagatagtgctaacattatttataacggtgtagaatctacgttaaaagacattaaatggtatgaagactctacgcatgtcattacacttgataaacaacgtgacgagctacatgaggatgtatataacttcttggagcaactagattggtaagatctagttgcctctttttttcataaggaattttttgtgaaaactgtaaaaatcataaggggagtattgaagtttcactttatacatcccctatctttcggatacactaaataatataaggttttaaaggaggtatttttgcttggaagaaatcatacaagaacatattgataagttgttattatttatgagagaagaagcgtataaaccgctaacgatacaagagttagaagaggcatttgggattgaaggttctgagggctttaaagatttcgtaaaggcacttgtaacgatggaagaaaagggacttgttattcgtactcgtagcaaccgttacggtcttcctgaaaagatgaatttagtaagaggtaagttaattggacatgcacgtggttttgcattcgttgtaccagacgagaagaaaacgggagacgatgatcttttcatcccgcctacagaattaaacggtgcacttcatggcgatacagtattagcacgccttagttctcaatcgagcggttcgcgtcaagaaggttcaattgtacgcattttagagcgtggaacgaaagaactagttggtacatatacagaatcgaaaaactttggattcgttatacctgacaataagcgctggacgagtgatatctttatcttgaaaagcgcatcgatgggtgctgtagaaggtcataaagtagttgtgaaaattacgagctatccagagaatcgtttaagtgcagaaggtgaagttattcaaattctaggtcataaaaatgatccaggagtagatattttatctgtcattcataaacatcatttacctttagcattccctgaggaagtgatggagcatgcaaacagtgtaccagaaacgatttcagaagaagatttaaaagatcgccgcgacctgcgcgatcaaatgatcgtaacgattgatggtgcagatgcgaaagacttagatgatgctgttacagtaacgaagcttgagaacggtaactacaagctaggcgttcacattgcggatgtaagtcattacgttcaagaaggctctccaattgatgttgaagcagcggaaagagcgacgagtgtatatcttgttgaccgtgtaatcccgatgattccgcatcgtctatctaacggtatttgttcattaaatccgaaagtagaccgtctgacgttatcttgtgaaatggaaatcaacaacttaggtgatgttgttaaacacgagattttccaaagtgtgattaaaacgacagagcgtatgacgtatgctgacgtaagaagcattttagaagatgaggacgaagagttaattaagcgttatgagccgctcgtaccgatgtttaaagagatgggtcaattggcacaaattttacgtgaaaaacgtatgcgccgtggtgcaattgactttgactttaaagaagcgaaagtattagtggatgaagaaggaaaaccgactgatgttgttatgcgtgatcgttctgtttcagagaagttaattgaagaatttatgcttgttgcgaatgaaacagtagcagagcacttccactggatgaacgtaccgtttatgtaccgtgtccatgaagatccgaaagaagataagcttgagcgtttcttcgagtttgtaacgaacttcggatatgcggtaaaaggacgtgcgaatgaagtgcaccctcgtgcgctgcaacaaattcttgaaatggttcaaggacagccagaagaagtagttatttcaacagttatgcttcgttctatgaagcaagctcgttacgatgcggatagtttaggacatttcggtttatcaactgagttctacacacacttcacatcaccaattcgtcgttacccagatacaatcgttcatagattaattcgtgaatacattattaatggtaaagtcgacaatgaaacgcaagcaaaatggcgtgaaaaattacctgagattgcagagcactcttctaatatggaacgccgtgctgttgaagcagagcgtgaaacagatgagatgaaaaaagcagagtatatggttgataagatcggtgaagagtatgacggtatgattagttctgtaacaaacttcggtttattcgtagagcttccaaatacaattgaaggtcttgtacacgttagctacttaacggatgattactaccgttatgacgagcaacatttcgctatgatcggagaacgtacaggaaacgtattccgcatcggtgatgaaattacaattcgcgttattaacgtaaacaaagacgagcgtgcaatcgactttgaaatcgttggcatgaaaggcacacctcgccgtaagttcaaagatcgtccagtcgttatcgaacagccaagaacaggcagaaagaaacgcggtggacgtagcgagcgcagtagcgagcgcagtaatgagcgcggcggtgaacgtggcacaggtagaaaatttgaccgtggtggcaaaggaaaaggaagaggatctgcatctgcatccgcttctgctagccagccaggaaaaaaagatggtaacggtaagaagaaaaaagcattcttcgaaaacgtaccaggattcaagaagaaaaagaaaaagcgtaagtaagaaaagagtggcttcgctttgatgaaaagcggggccgttttcttttttcttcgtggcttgagagcgagccactttcgctttttattaacatttgttacaatagtaaaaatagaggagggacgttatatgccaaagggtacaggtaaggttattgcacagaataaaaaagcatttcatgattatttcatcgaagaaacatacgaagcagggcttgtccttcaaggaacggaaattaagtcaattcgcgctggacgcgtaaacttgaaagatgcgtttgcacgtgtacataatggtgaagtatgggttcataatatgcacattaatacgtacgaacaagggaatcgtttcaaccatgatccacttcgtacgagaaaattacttctgcataaaaaagaaattgataagctagcgggcgctgcgaaagaaacaggttacgcattagttccacttagaatttatttgaaaaatggatttgcaaagatggcacttggtttagcaaaaggtaaaaagcaatacgataaacgtcacgatttaaaagagaaagaagctaaacgtgaaattgcacgcgcgttccgtgatcgccaaaagatgtaatacagatatttacatttgtaaaatggagcgcgtatgttataataacttatgtaagattgttgcacattgaaaaacagctcttagtagctatcacgatattttcttcgtatgctccatttttatcatggggacgttacggattcgacagggatagttcgagcttaggttgcgagtcgaggggatcggcctcgttaaaacgtcaaagcctataattggcaaacaaaacaatctttctttagctgcttaattgcactaaaggttcctccctccatcgtccatgtggtagggtaagggactcaaactaagtggactacgccggagttcgccgtctgaggacaaaggaagagaacaaccagactagcaacttggaagcctgtcgataggccgaagagttcgcgaaatgctaatatatcgactacactcgtagaagcttaagtgccgatatttttggacgtgggttcgactcccaccgtctccaccaatacatatttggtggtttttttattttttataacaggaagcataagatggccgttttggtcaacttatgcttcttttagtttacggccaacttatgcttccaggatttgaagaatatttttaatgtcgcctttaaataaagtcgcgacttttagggatagcatcacatcatcatcaatctaagaatagcaaataccccaaaacgaaaaaaatgtacatttttttcgttttggggcgttataaaatccttaagttgatgggcatatggcgactcatttctagaattgttttcatgtgtcaatgatagaaatatatttttaattatggctacttttcaactagtacgatatcatcaagataggcatcaccgatgttaacatatccattaatttgtaagatgaccttatatggattattagtatttagagtagtaaattcaaccgatttttgttcatactgtgtggaagtaaacgtcataacaaatgtgttttctcccccaggagactgtgctcctacaaataaggttttttcaggacccgatacttttccagatgcggacatgatgtatgtagtattaggcttcaaagttacgtctcccttaagatgaccagctcctgaactaaaatgaagtcctttagaattatttactcctgcatgctcttcaatattgtaaattaaagagccatatgctggtttaaaaggttctaaacttgaattgtggtcaaaatcaatatttaaaatataagggttctccttctcatttaattgtacattatcaaacttaaccctcccatttgctgtagaagcaagtttgacagcaaagtttgacacatcttcccctgttttaaacttcatctcatgatgttccggcttaaatcctgaatattgcttttttgttaatggaatgatttcttgatgggcattcagattacctactgttacttctgatggagaacctatacttcccgctatatcaaatgttaatgtatattctgtattcggctttacagtaacaggctgataggctgtgtcggcatgtattaatttgagataatgattgcctggttcagaagtgccgatattctcggtagaagaattaggattagataaaatccagttatttagcccatcctcaaaatctccattcttaacttgttcatttgcagatgaactatctgctgatacaatacctgaaaaacctatactggcacttaatacaattgctgtagaaaagactcctataccgactttttttaacaatctcttcatctcctttggtcagattaaaatttactttttcatatttctatatatgtttggataaacctgacaaagaaccattttaacaataaataaattatgtatccgagatttaggttattttcatttgaaggagtagagggagcaaccgtgctgtgaagtgcaaagtagctccatctatccctaaatggtcctcttccacccaaaaacaaggagaacttttttattgctcaagtattaggggtcaccatacatgcccatcaacttaagaatttgcactacccccaagtgtcaaaaaacgttattcgccatttgataggtctcataacccttttgatgaagtttatggggtgagctgcttgagggaaaacctcacgagcagttcttatggggagaggctggaaacggatcacaactgataccgcgccagtcttttacccgacaaattttgttcaaaatatggaaatctttttttaaaattgacaggtgcaaagaaattaagaaagaacgcttagaatgccatttatatgggcaactcattagtattttactctgtttatcgacgatgttcaaaatgcgtcagttactcttggataagaaaaagaaagagttaagtgaatacaaatccatctatatgataaagaattattatcaattgttttatgagggactacaaaagagcatccatgaattattaaaagttttgctgcgtttgttttaccttttagagaaaaacgggagaaaatctcatcggtatgaaaagaaaaccgtttttgatattttaggtgttgtgtatgattatatgttgtcaaaaagtttcaaggttgcataatattttttaaaatgcccagttaataggtttatttgttatgcctatctttagaacagtcgtagaaatttaaaggaataatcctcacatataacctcttagcgccctaaggttgatggcgatgtggcggcatcccattgctatcaacctaacagaacaggttgatagcaaaagttttttatacaaaataacatcaaaaaatacgtcttgaacaagtgttaaaaaagaaagctgaagggcaagtatatccttttggagtctttttaagagaaaatgatacaatgaagataatattaggaaattatggggatgattacgttgcttactttaataaaatttgtagttagttatgctgcaagtctatttgcttttatttttggatggttcttaatttcatatatttttaatcctagctttattcacccggacgttttacagggattcataaaaactatcgtcacttatggtagtataccagctcttatagcttgtttacttggggaagtcttatataggaaaattaaacgatgtagagagtttcaatttggaattcctttatttataggactagcattgatctatacacttatactatatctttttctttttacttttactttttcacatttctttgacttcgttgcacctgttattatgggttccttagcattttatttagtacgtagaaaaatataattttcgttttgatgcattataatagctatctctgaatcaccagtttcaaaaagccttcatgcaatgatgattgcatgaaggcttttgatgttttcttatttttttgtatcgttaacccatgtaataatgtcctggatgacgtattcgggaacgttagcagggatttcgtattcactaggaagacttaattctccgtcaccctccgtgaagaaatgattcaatttcggatattttttgaactgaacattcccgcggtttgaaagtcctttctgccattttgtatattcatcttttactgttacttgataatcacgtgctccttgcagaatgagtaaaggctcttttcgtgattttgcctcttcaactggacgcaacctagaaacatcatacataaaatgaggtgacccaaaattgtagccagctggaggatggtcaggattgaaagtaggatcctgaataaaagcagcctgtctttttagttcatcgatttcttcctttggtttcctaaggtattgatactgatcaatggcaatgtcagtcaaagggcgtgcaggtggtgcgagtaagatgcttcctcggacaagtgaggaaggtgctttgcttagtatacgtggcattgtgccagctcctaggctatgtccaagaatgaaaatattatttggatcaatgccttcctgctgcactgctgactttgctgcatatatggcatcatctgtagtatcacggtctaacgtaacaggttctgcactcatctttaatgcatgttctaaggtgcgtttttcatagcgcaacactgcaattccgttggatgaaaggcccaccgcaaggtctcgtaagatttttgttcccatatatgtgctatcgcgatcatggatgccagcaccatgaacaagaacaactacgggcagcttttcaccacgcttatgtttcggaactgttaatgtggatggtaacggataggtagaatttccaatgacgatttcacgttcttgatagaaatcaggttgatcatagctaggatgggggatggtaaaatattcctcgggtgacctttctccaacttcatctactttcccgccaggtgtgaatttaaggagtagcggtatggtagttccttcggtagctgctggaatttctaccgtctgatggaccaagtttcgttcttttatcacgggggttcccatgctttttatcctgctccagccactttgtgtccaccagttttgtaatgtggttgctgtaaacttggattgaaaagcagcagacgtcaactgtattgcctctgcatacttaccttgctggagatattcaaaaaataatgatgtacgctccattaaagagactagtttcttttcagcagattgttcctcatgtgtatctgcgtgaatagttgttgtaagcgggaaagatgaaacgcctaaagaaaagagtagggtaaaggtaaggactgatttttgtattttcttttttttattcatgtttcaacctccaatatgtgatggtacaaaacaggtatggtaattagaattctggtgcgaaaacttcaaaatatttgcaagcaatctccaaaacttggacatactaatattattattctaaaaaaatgtaaatttcttctcttgttacatgcatattaatcccagaaataatctttcttccttcactttatattttgattatacgaagcaaagctctcgtttttcttacttgatacttacaaattccttaagtagaggatattttaaaattttggctgtatgaatatgtagcggtactcctatgttaagagatagcttaaggaccgaggattatattgtttttataaagagttgatgttatgtttgttttgtaacatatggtgttttatgcatgtaggaggatttattgaagaaattattaatattgtttttattagctacattttgtctacagattacaggatgttctaataatatgggtacactaagggagaagtctaaaactttaacaactgtgaagtctaaacgcatcaataaagggtggtacaaacatatgtaatagtttgtatcaccctttgttgatgttagaagtcataaggaaaaggttgatagttagatatttttcataaagaaaagacacccatataagagtgtcctttctaatagttttttagcagaagcaactgcatccgataatgattaatagtataaagagtacaacaagcaaagcaaatcctccagcaaaaccacagccttctccgcaactaccaccatagcccataatagttcctcctttaggtaagaggattaaaactaaggttcattcatgtattttaacgggttcactttactttatgtttttaagaatgaatggagcaggtccttttaaaaataaagaaaagacccccctaaagtgccttccttcaacttgaaccatcttaattttaataatatattggactcctatccgaatactattttactatgctaatttttttgttcattgaggggtagcaccacatcgctatcaagttaagtccatacaacgttaattatagtagaggttgtttcttttttttaaagctatgtgtagggaatttaaagatttgcatacgaaataaaccctaatgggtttcaattttttgatttaagccccttgattatcaaacatggtacaattgtaaatgacacctaatatatcaaagattgttttcttctcatatcgatgagatttcctcccgttttgctgtaggaggttgaacgggcgaagtaatacctttgatagctcttgggtgtctttttgtatcgattggaaaagaagaaaaaagtaatctttaatcatatatatggccttatattcactcagttctcgtttctttttcataagaagtaattgacgcatttgaaacatagtagacgaacagagtagaatggcgatcagttgcccatacaaatggcattctaatctttcacgttttatctttttacaatggtgaatatgaaagaatgacttccatgttttaaataaaatctcgatttgccaacgtaaagaataccgatcatgtacttgtcccatcgggacaatatttgtagaggcgtttgtcatatatacattgataccactaagtcgtttgctacgaggagaatacttcattcctttctttttttctcgtatagcttgatcacgtaatcgtttttgttgttgttcatctgtaagtcgatgaacaatcacacgagctggcactttatcagtcattcccacataagcgtcggatatttcatatgtttgtcctggctgaagagagttcattaaaacctccatatctatttggatatactctgtacccttcttaattctgccatcttgaaaataatcagggtttagatttttttgataaatacgtgtatttgatttgatacgtgagatataataagcctttttatcttgtatatgttgaagatctttcaaatgaaaataacctaagtctcggatacataaatcattcgctgttacagttggggcacacagggaaccgtaggttcgatcatgttgtttacctggacctgtatgaatatgaaggaattgtccacttaataaaccatactcaagctgtatctttactcccgctgtatggctgcatcctcccgcaccaggataaattgatgaaaatatatccggaagttgaaatgcagttgaatctaaaatacgaatacgcttgaaaacagaagtatatggataagaaattggcatagatgaggtcagtttttggtttagtagttcagctaatatgtgttgtaaaaattgaacagccgctttattaaatcgttgattcaagccctcagggctgatgagtacttctgttgatgcttctaaacagctagataactgagttaaagaagtcatagctacattttggctcacccatacacataaagcgactaaatcttttgcttggtacttactggttcgttgtacaaagccaacatctctagcaagatttcgtaaggcatttggagatagggcactttgaatctcttgagcaaatagttgtaattcgttagacacagaaacagacataaaaaacgccatcctttcctatgattctacagaaagaatagcgtattttttcgttattttatagtaaaataggtctcatggtatgaatgtacaatttagatatttgcccaatgaaccatatgcttttagaactgagaaagaccttgaaacaaataagttatatattttaatgcagtaatattacaagcagtatagatgggaacatcaagaacttaaatgatttaagattcacactatataaaagttgaagtatacgactaaggaaagagtgctttgcagtgtgctgcatattcaagaattaatcttacgtagggagtgcttatatgaaaagcatgaaaaatgtaatattgctagtagtatgtttcatatttttaagtggttgtaatcaagttaatgaagatgaggtacaaaaatatataaaagaaaaacacggaatcgatgttgttgtaacacatatgagccctttaaatgaaaataatatgggacatgcataccatactgtgcaagcaaagaataataaaaatattcaatttcgagtagaggtagatggtctcttctattcatccataaaaagtgatgaatacaaatatggaaaaaaaacatttgaggcatatcagaaattccaaccaactctagaagaaataaaaaaattagggtacgtggaaactaaaactgataacactcttcaatatttgtcagaggatagaagatcagatgaaggaaaaccaactaatgaattattattaactttgcaaatgagtaacgagattgactttagccaatttgaatcagtagaattagatcgtttatatactctatttcaactcatccagaaaaataataaaaagataacagaacttgaaattaaggattataatggcaaatctttaggtggaccttttaaaaatgtgcaaaaaatgataacaaaagaagagctgttactaacaatgaaaaaaacgatgggcaatgccatagacatttatttggaaaattggattaaaaatcatacaaaaatagaagagagattaattgcaattcaaaacaatcattttgaattggaaggtattacttattcaaatttgaaagatggggatgttcgaggatataaggtgtatttagttattaataccagtagtaatgaatttgaaaataatccccttgtaattaaagatttaatcaaggtaaccacaatccttaaagaagaactatataataaaaaatttaagatatatttagacaataagaatggaacaagatatacaccttggttatcatcagaagaaattaaaaaagctattaacatcgaagaacttgtaaaagagcgatatcctaagaattaaatttaaagtactgttgctgtttgttatttgatgggaaagcatgatatttcgatttgttccgccagcttgcaaattaggggtctgttgtaaagtttattaacaggtagaaagttagaataagtatagccgaatctgattgaagaggaagtacgacatcatcttaaattaggggtacagacacatgcccatcaacctaaagttttaatacacccccagaacgaaatttttaggatttcttgtaacgaaaaagcttatttatcgttttgggggtgaactgttttcttaggttggtagcgatgtggcgagacccctaccaataaatagatagctaatcagtaatgtggaaactgaataagcaaaaactctcatacatgttgcaactccaattaaaataagacaagctagaattgccttttttgctccatacttcttattcaccttaactgtaaataatgcaaacacgcccatacataatacgggaatagatgtttggtggtgtaattatttatttaatcgtttcagtaataactctcgtaagctgtccgatagtgcatccacctcaattatctgttctattgcttctatattgtatttgtcgtggaacttaacatgattgacttgtgaaattgatacttttttaggatgcgatgcaacgagttgtaaaaaaaaacgacctttaatcaatccttttttttacatttcctttttctaaaaccacagaaaagataagtactatagttaacaccataataaaccttacttcacttccatcacttagaaaaaatgaatacaaagtataaattaaaattaatattccataaataattttgtacaatgaacttccaccttctcctatatatattttagtataaaagtttaattcaagtcctagatcaaaataaaaataaaaaggacctgtgatgtacacaaagtgcttttctcttgtcaatttatctattttcactatacttatctattttctttttataactcaaacttcttagaaccgtacttttagctttttgcaattcattttatttatatggaatatgtttttatctgtctgtacatcttcaacattttctccatctactaatggcgtgccctgttaatactgttgtaaccccctccttttgtttgattacttgtatcataaaacaagtatctgaagtttatatgtagtctatctagaatctatgtaaattaaaaaaatttctaacaaactgtttgtattgtaacgttaccaccaaaactattgctctaaacaccataatttgaagaaacagtaccccatgttctaaccctcaattcctcctacacctctatgttgagtaaaactagttaatctctataatataaaaagagcaccccttttgggatgctcttcgttataactatatattatttaattttcttcatttgttggtaccatttttccttgttgagaatccgtacctgtaccttctgatttttcaacagtttttgcatgttttccaggttgtgattctgtacctccatttgtttctaccatttttccttgttgagaatctgtacctgtaccttctgttctttcaacagtttttgcatgttttccaggttgtgattctgtaccttcttttgtttctaccatttttccttgttgagaatctgtacctgtaccttctgatttttcaacagtttttacatctcctttagatgctggcactgcatctttaggtaaatcaaagttttgtgaggaagacgttgttccatctgcactctgtgtaattacttgatttgaattttcatttgactttaaattgtccgttttcgcatcatctgcaccaattgcaccacccgctaataatcctgtacttaaaaatgctcctgctaataatgttttaatcatttttcattacctcctgtttatttgtaatattcatcaaaaaagtatctagagttaatgttttagtcattatctttatctacttgctttttgattacatttagcataaggcaagaatctatagttgatatggactgtatctggagattatgtaaagaaaaatagatgatcaattgtatatcctaatgaatgcttagacaagattaacattttatatgagtttgatagttgaattatcctttgtttttgattgtaaggtttatggctggggtaaagcaaattaaggacctaatcttttctaatttggaagtaaacttttggataaaagtttacattggagttttgaatcatttatagttaattttgtaataaatttctcaatattgatatacttgttaattatggttttaatattcaaaattaataaaaagtattgtagttcttgtgcgaaaagattcagttcatttgagatgattgggttcatcaaaaacgccatcctttctgtatatttctacaaaaagaatagcgcttttttgttttatggatacagatttatcttagcttaatagcaattagtgtaacatccatgtgtatacatggtctttttcatactgtctacctaaaggggataatatcaatcaaaagcgggcttttgatattctggtttaggttaactgcaccactttaaaacgaataggactccccatcagatggcactaaaatagtgttagataatcctttcttatcaataaagtcattcaattcctttctggttaataggcaatggttaagtgattccatatgagaaacgataattttggcctgtggtgctgcctgttttgtgtcataaatatcctcttttgtcattgtaatagggccaccttctagaaactgagcagcacctccattgatcacaataacttcagggtcgtgcgtgtcaattgcttgttgaacatcgttacaccatattgtatcacctgccacatacaatctcggctcgtctggatgattaaatacgatacctgatacttcaccggtaaactttgtgatttcgccagttccatgttgtccatttgttttaaatagcttaatttcttctatgttggtaacatgctgtaaagattctatattgtgaaagccttctttattaatagcctcaatatcatgttcattttgtgcatagatttttatatccttaggtaaaacttttttagcaacttcgtcaaagtgatcaggatgtaaatgcgtgatgataaccgcatcaacctgaataatttcttctatagaaattggtaaactaactaacggatttctcatatcttgatttggtgtatttggaaacggtggaatggatcctttgtcagctaaaaaaggatcgatcaaaaacttcttgtctgcataatgtacaacaagtgttgcattacgtataagtctaatatccatgcggtattcctcccttttatatgattcaacaatagtataaaatatgagagaaatcatgttacatagataaaatcaaaaatttataaggtttgacttgaaatgtgaaaggatgtgtcacggtgttagatgatacagataaaaaaatactagaagcgttattgaaaaatggccgtacgtcaatgaaggaattaggagaaaaagtccatctgacagggcaagcaacctcatctagagtaataaggctggaagagaaaggcatcatagaaggttatacgattaaactgaatgaaagaaaactaggttactatgttcacgcatttataaatatttatacaaggagcattcaacacagttcctatttatcatttgtaaaaacacaacacgaatatatcataaagaacttcaaaattagcggtgaaggttgttatcttctagagtgtaagtttccatctaatgaagcccttgatcaattcttaactcaactaaacgaacatgctaattacaaattatctatcgtaattaaatagaagaaccatcgatataaaaaaacgctattcttgctggagaaatatatataaagaatagcatttttttcattttagggaaatgttgttttataatatcccaaaacaagattttatgctaatttgtaataaaaaagctcattttttcgttttggggctggtttgtattcttaagttgatgggcatggggtaccgtctgcattttggaaaaaccccatgctaagcaaaaaatacgatgagccgtccatacggacggctcatttacataattttcgttagcggaagttattttaaaagttctattaaacaacaaaaacagtcttgattaatcaagactgtttttgtttgtgaaaaatttatctatcagtttagaatctttgttgtttagtaaaataccttgtgtatgttttttgtctgtatctttagcaattgtaatttcgtttttatcattgatcaaaacgaaatattgttctttggaatcatcttttaatgtaactgtcatgttagtgtggattgaatcttttgtttgtttatctagtgagatttctttaggtgttcctgtttcgatagctgttttgatagcttttgttatttcttcattgtctgttgttgatttagagtggctatcttttccagcggaatctaatctgatttcctgtatatctttctcttttaattggatagttgcactttcttttgtatcagtaggttttgatgaagaaagattagaacatcccataggaattaagaataatatgctaagagaacataactgtagaatctttttcgttttttttcattgttttcaccccttccttttaattgtaataatattctgataaattcgatagactttttatttgaatacctttatgtatgattaaaaattggatgtataccatatgcatatgaagttaacataacgtctcattatcagtagcaaagagaaagacgttcccttactctcacaagggatttttctttttctatgactctatgcatctttatatacattcttattctggggcgccttttggcttccttatagttcccgatgtctccctattttttgcataagttcttgcatactcttagcgtgttttttttccgaaatgctggcaggacacctaataacaacactataaaaagacttaaattcctcataaggattaagtcttttttcatctcacctttatataaatataaaacaaaatataaaaacacttagcttattttttgtttttggaatacctaatttcttaagttgatggatgtggtgctacctctcatatatcattacccaatatttttcttctagctcaccttcttcaataacttttttccagcccatattctcataaaactttaatgctttttgatttttagaaacacactttaatcttaatggtatattcatcttttctatggaagcatgaagtaactgtcttccaacccccttaccaaagaactcaggatgtacaaataaattgtgtataaagttttcaggtaaatataaagaagcaaatccgaggatatgattatcttcctctgctagtagtatatgttctccttcagtatgtttatcaaaatcttctacagtcatttcatttctatctagccaatgaaaactttcacgccgtgattctaaatatatccttcttaaattagggtagtctaatgcagttgctactctaatattcattttctcactctctcttcctttttttaattaaataaatctaaccgtttctagagtaaacggttaaatttacgagagaaatttattcactcgtatctctttaaaacaatggctgcattatgacctccgaaaccaaatgagttagatagacctatatttattttcacttggcgagcaacagatggtacataatccagatcacataatggatcaagattttctaagttaattgttggaggaactgtcccttcctttaagctcattgctagagcaattgcttcaactccaccagctgcccctaacatatgaccaagcatagatttattagctgttaccggaatctgataagcttgttttccaaacagttgcttaatagccatcgtttcagagatgtcccccacttttgtacttgttgcatgggcactaataacatcaacttcttcaggcgatatattggcattttttaaagctgatctcattgcaagataagcacctttaccttccggatgtgtagctacgatatggtatgcgtctgaacttgcaccatatccaatgacttctgcataaatctttgcctctctatgtaaagcatgagataaagattctaagattagaattccagctccttctgacatgacaaatccatctcgattttcatcaaatggacgactagctttagtgggattatcgtttcttgttgataatgctgtagcgttaccaaaactggctattgataagtctgttatagctgactctgttccacccgcaaatataacgtcagcttccccagaacgaattagtctaaaggcttccccgatagatgtatttccaattgcacaggcagaaacaggtgacatagaaggtcccatcgcattccacttgatactaatttgtgctgcagcagcattagacattatggcaggtactagagttgggctgactcttcttggtcccttctgcctaagtgcatcaacattttcaatcaaggtttcaatccctccgatacctgaacctacgtatacgcctaacctttctacatctatacgatcgaggtctaacttagaatctgaccaagcttgttcagctgcagccaaagcaaattgagaaaaacgatctaaacgtcttgcttctttctttcctaaaacttcatctgcatcaaaatcttggacgatacctgcaatttttgttttatgattggtaacatcaaaagtatcgatattgactataccagattcccctttaattagattgttccaaaatgttttgatgtcgtttcctataggagaaactacgcccataccagtaatcacaactctttccactttgcaatccctccaatcaataatatacttgtattttacagtcaatttatcctattacaaggggggatttatcctagtataactactactaggataaattgataagataaggagttttaaaaatgaataataaaacaaggcttaaagctctgtcggcattcttaaaagctaagcgcgcccaaattagtccagagtctattggtttgtctgccggaaaccggagaagaacacctgggttacgaagagaagaggttgcgcagttagcaggtgtaagcaccacttggtatacatggctagagcaaggaagagatataaaggtttctacaatcgtacttgattgtatttctaaagctttgcaattaaataatgatgaaacagactacttatatgacctggcattcgaaacaaattcagaaagtacaagtccaaaaaaggatcaatcaaagcttagcccttctttaatacgaatactagatgaattaacatattgtccaactatcattacggatcgacattgccatattatgggctggaatcctgcagctgctcatgtttttttagattttgaacaaataccaaataatcaaagaaatttgattcgtttagtattcactagaaaagagttaaaagcattggccgtcaattgggaacatttcgtgaaaggttttcttgctattttccgtacctattatggacgctatttagacgatgaatggtacagccagtttattgaagaaatgagtcgttcccatccagaattccagaatttatggcaagaaagtcaagtgagtaaggctccagacatgataattgaattcagacatgctaaagcaggcaaaatgttgtttaatttaacttcttttcaagttcaaggtgatatggatttacggtgtagtatctatacgccagtaggggaaacggatacagaaaataaattaaagcgattaatgaagagggtatccgttgaaaattaataaagtaagttcattacattagcaaaatgataatgattactgaacaaagtcattattccttatgggaaaaagagttaactttactttttcctttttgttcaatgggtggatggcgttagttgaaggatcatagaaatgaacagacttttttataaaagaatgaatcaattaaataaagtaagagcgtgtttcgaacaatttcagaacacataggtcatttatctctttgttctgtacccattaaagatttccacagtactaggtcaatctatcttgtttctcgtacagaaaagataggacgagctcttttttaaacatttatgacttagcccccatatctatcaccctaacaaaaaaggttacccaaaaactataaaaatgaacttcggtgctgtaaaaaacacaaaattatcgtttaggggcttctttaaagtcttagcttgatagcgatggtgtaccgccacattgctatcaagctaaggctaagaaagggcagtttcagaagggattttttcttattctaaaaaccagtgcaaatcattggggattctgcatatcaaataaatcctaacgggtttcatttttaaaattaagcggcttaattatcagacatggtccaattgtaaacgacacctaatatattaaagactgttttctccctgtatcgatggggattttcgtccgtttcgctgtaagagtttcagcaggcgaagaagaatgtttgaaaatctaatattttttagaatcgtaacctttataggtggagttgtattagtaaattcatgatagctataataaaaatttttaaacaataccaattaattttgtattttaaaattaatacttgcaaatccaatacaatctgtatacagattgtatacaaaatgtaacgagaggtgaaaatgatggcagaaacatatcgtaaagctaaggtattaaaatttctagacaaattacgtgaaatgaaagagatgaatataaaatattcacagatgtatttgataaacttaaaagaattaattcctcatatggagaatgatatattttttctggaaaatgtagaagaaatagaagatattttagaaaatctacagtttaagaaagaggaagaaaatattgttttatcaagagagcaactcatgttttttaaggaagcaactaatgctataacaacaatcaaagatatcaatattattttggaagaagctggagagttttttgacttagatattcctgaaagaaaagtgaaatctggaatggtaaattacaaaattcaatccattgatccaatggatatgactggtattaaaaagcaatattatattatgttaggggaaattggtgtatcataccctgatggaacaggcgatgaagaatttgtagcggctgcaaataaagtatttctggagtatgttacacataatgatattacaaaagtagatgatggttttattgtttcgctaccggtatttgcttctcatcaagtgataaaagatttaacgaatgcagatttaacagttcttgcaatgattcctataaaagaaaaagaataagaagtcatagaaaataagtaaatggctgaattgaaaaatcaagtattagagattttagaggaaatatgtgaaaccgatataataaaagaaagtccataaaaagctttgaatttcttgagcaaatagttataattcatcaaatacagaaatagacatacaaaaataccaccctttcctatgattctacagaaagaatagcgtattttttattttagggggatttttgaagaaggaattaatacaatatgtaaaaatactctgctatctagtgaacagttttatactttccgaataatagtcaaataaatggatgatactatacttatataatcattatcaggagaatctgcagatttgcaggtccttttttattttatcgaaagtaaacttttagccagcagtttattttcctactattgatttttatacgtatttggtgaaaaatcaaggagctgcaaaaaaatactataccgaaagttcggtatagtaacgtgcatataaaagattccatcttggtatatctccgaaagagtcataaaaatctatgtttttttaattcagttgtaaactacaaaacttctttttaaagaaatgtatgtacatacaaattatattttattccataactctctaacttttgttcacgatagtctgatattgaaaaaatataatatttggtacgacatcactttgtttttttataaagttttgtaattaaactataatattgtattttttttgtattattgaaattagtaataataaaatgtattattgaaaagcacaatttataattcaagtaatcaggactatgcgcccattataatttgaacattcagaaattataatattgtctaaaaatgaggtgagattcatagaaacagtacatattaaatggtatggaatgtatagtataaatgatttttataatagggaagaagcttctaagaaggggatatttgcaatctctagagtatgtgctaagagtgtaacattgctatatataggacaaaccaaaagaagctttatacaaaagataagggaacttaataaggagtggcctttcgatgagagcgaattaaagattacattaggaataatagaatttcctagtggtgaaatttactctgaaaagaaggtaaaagagataaaatcccttttgattttacgacataccccattagaaaacgaaacatctttattatactatagagggaaatttaatttaaaaattataaataagggaagaagaggtttaattgttaaaaagctttctacaggagatctaatatggacataattggaatcacctttgaataaaattgaaagtttcttaagtgcagaagcttatctatttttaatgtattaaactattttgaataacatatgtcagatacttgaaaaaacacaaattttattatgatatgaaatcctgtatggaaagtgtagtttatttctattgtttaataaaaatattaagaattttagggataatacataaagagtagaggagaaagtaaacacggaggtttgaagaatgggacaagtaagcagatttcaagaaaaacaacagaatcgtcgtcaaaaggcaatttttaatattgcatttactttggtattagtgacagttggtatagtgacataccaattgtttaccccttctaatacatcaacgaaagcaattgctcaagaaaagaaagtaacaaagatagaagagaagaaaactgaagataaagaaacagcaaagatagaagagaagaaaactgaagataaagaaacagcaaagatagaagagaagaaaactgaagataaagaaacagcaaagatagaagagaagaaaactgaagataaagaaacagcaaagatagaagagaagaaaactgaagataaagaaacagcaaagatagaagagaagaaaactgaagataaagaggcagcacagctagaagagaaatcaaaaacagaaaaatcggtaaaaacgaacggaactgaaaataatgaggaagaaaaaacggcatctcaagaaaagggttctcaaactaatccttcttggaagccaattggtaccgagcaaggagcaaaacctgaaatgaaatttaaagaaggaacagtagattggagtgagatgaaaaaagcaatttcttatgctgttgatgttccagagagccaattgattttcgattttattgggaataatggtaataataaagcctacggtaatgtacgagataagcaaaataataaaaaatataaggttaatattgattgggtagaaaatcaggggtggaaaccagtatctgtacaagtggtaagataaataatagaaatgtaatgatgtaaatcagctgtccatatggacagctgattattttttttgcttagcgtatttttttgaaaatgctggtggtacctcgttgagaaacatgaattaaatctatattttgttttatttacctcactactttatccataacttctttatatttataatagtaattagtttcaaataaatagttgtagggaagaaaatgttccttgtaagtagtaagcatcctttgcaattttactttataattatttataaaaaagaaaagacaccctaaggtgccttccttcgacttgaaccatcttaattttaataatatattggactcccatccaaatattattttaccatgttaaattgttttattcattgagaaatatagtttcattttatatttaaaagaattctataggctagaaccacctattaattagggggaactgacatgttaagctaatattatagtacttctagaacggaaatttttttaaatatgtatacgagccacataccaaaaaaaagacactctcaagagtgcctctccttagcagccgaatccgccgccccaacagctagcgccaacgatgattaataagatgaagagcacaacaagtaaggcaaatccgccgccgaaaccacagcctccaccacaactaccgccatagcccatattaactcctccttccataaagaccatttattaatggatttaatttaatttatgtttttaaggatgaatggagcaggtccttaaaaaaataaaaggattttagaagttaaaaagagttgacgaccttatttttgtcaccggtatccccccttctacatattgtattttattctgtgtattgggggaaggaggatcttatggctaattctgagatgattttacgtttacttacggatttaaagattgaacaacaattgttgaaagaacagttagagaaaatgcaaacagctgtgactattcttgaagaaaaatcagtgacgcttaaagaaaaaccagcgacgcttaaagaaaaaacaatgactcctgaagaaaaaccatctgttacaaagcaaagagctttttctggacgcccaacatcctttcgtgattggagagcatctagtcaaaaaaattagggaatgttatgtgaaatgataaatgaaaaagtacagtctgctgtagaaaagactgtacttttttatgttagtagagaatgttaagggagacgtatttattttgcctattccaattccacttttaattggagctctttatctaacttatcattattaaattttaaagttaatcctcgcgtgtttttcggtacatcgaatacaatgtttccgtccgaatgttcatcagggttaacaataccaaatttaaatgtagacgtatttgcagctttaagtacggattgatattcattagaaatgtgatattctcttccaaatccatcaattaatttaaagttgttaatatctagtgtaatgggttcttctttacgattataaactgcgatgtctaatactttaaagacaccttgtgctttaacttctccagtccctataacatctaatgactcggcagatcccattgacatgtatacatcagaggaatctacattggtaggaagttctttttgcgaatccttgctgctaagtttgtcattctctgtttttttagaagtcgcctgctcatttttcgcaggcgcatcatgtgaaccgcaagctgatactccaaacaagaatgtgctacataataatgaggctaataactttttgttcatcgtttcttccttccaaaatagaagcactttaatgagtgctatatatttgtctttatatgtattacattttatatcttattatattaattttggaaggaaaaggggaaatattgtgcatttctctgattcgagttatttatccgtctaaaagttgaaattaaaatgagccccataaatgataaaccattccactaacaaaaaacactaatcctaaaaataaaacaattaaagcaagtattccatttttattatgttccataaaattagctcctttttcatttacttacatacaaaaagcctttagtcgtaatgatggctaaaggctttggtcattatacttttgtggtcaatattactttatttagctgtatctgagtaatattcctcagcacgaaactctttaataagtgatatttcatttgtatctggattaaacttaaatattttaatttgatttgattcgtctttgtatgcaaatgtattctcaccaacttgggtcatattgctggtgtttaagataggatcgctaccgtgatcagtaatttctacagttttctcccggtcccaaaacgcaatgacaataatcaaaatgataagacatacccgtataaaacgtaattctcttgcaacaggatgttccatctgttagtctcctttactgtttgatagagtctgtttataaaagagataattcctaggaatataaataaaaaagacaccgtaaagtgtcttttttattttagttatgcgcattacttaataagacgctagttcctcagtctggctatgagtaactatgtagggtaattccattataacattttaaccagtaatgggtctatatggaattttgttgattttctttttgattattcagaatgacttgccaagtatttggatgaggaaagcagtgagacagaagcgactaaacatgttttagaagagtgtcttcttttttgtatcattgtgagtaaagtgtagagttatatttccctttacacaaacataacggtataatatagttaagttaagtaaacttaactattaagcaaaacgaaataaaagcatggaggatgctatgactagaacgtataaagaagtaattaatgaaatgaatcgagcctatacggaactctatattttactatttcaagatttaaaggatgagttcggtcttactgggcagcaagagagcatgttatttcatattcatttaaatgaaaacacgacagcaaataacattgcgagtacgtttaatataacgaaaagtgctgtgagccaagttttatcgaaattggaaaagcaacagatgatttcgaaacaagtgaatcctaacaataaaagggagtatttccttacgatcggtccaaacggtagtaaatatatcgaaagattgtctgagttagatgatgtattgatcgagaaatatttctcgaaaattgatattggagcgttgcagcaaatgactgatacgttaacgaaaataaataaagtgatattggaagaaaagcagaaggatcttgagtctaatgagtaagaatgaagatgaagcaattagtagaaaggaggagaagcgtgtgatgagttacataccaaatatgattacgatagcaaattttgtgtgtgggcttttggctattcacgctgttttcgttcacgatatgcatggtgcagttatgttcattattacaggtatggtatttgatctgtttgatggtatggtcgctcggaaactagatgctgcttcggaaataggcggagagttagactcatttgcggatttagtgaccttcggtgtggcaccatctattcttgcctatagtgtcgctttaaaagatttgcagtttatcgggatgatatgtgcgctcgcttatagtatttgcggaatgctgcggcttgctagatttaacacgcaacaaagcaaactcccaacattcatcggaatgcccattccatttgcggcaatgtgtctcctcattttatgcctcctaaataacccagtttccgtggcatttggcacatgcgtactcgcttatttaatggtgagtaaaatcaaattccctcattttaaaaaagatatatcggaaagcttgaagtccgaaagatgggattaataggaaagataaggagcataatatgattcgtatggcattaagatcattcaacatacaaatatattgtttattaggcgtgatgttattgggatggttgctgacaccttttccagcccagtttgtagggataagcatcggccttttagtgagtatgtactgcgcctggattttaggaaggcgtatcgaaaagttcggaaatagcatcgtaaaaaaagaaaaagcaccaatgctcggcatgatgaatcggtttgcagccgccatactcggtgcgattattatgtatgaaattgaacaccgtgagtacatgtggacatttgcagctggaattatgggtgggtatttcctgattattattaatttgggctattacagtatgagggatgagaagaaataaagtgctgtgtaaataactaatttggatgatttgaatgtaaaagcctcaaaactttcttttctagagagctttttattacaaagaaaagacacccatatatgaagtgcaccccaattgttagacacataactaacaattggaggtgcattttttaataccctagaggctgcctaatgaaacgacctgtctaactttcgggggtcacttcaatataattagatggcttttgtatgttactctatcgtttcaacttcacgtggatttttcatctcttccacatacacaactctaaatccgtgatcttctaaatcttccaataatgtctctaattcaccgtcgttaaactcttctcctaatgtaaacataattctacgaactaataaggcatcattatcaaaagtcatcaaactttgaataccagtgtatttctttaaaactgtcgataacttttggattgctccattatagtcttgcgttccaatcatgacagagtatttactagagtgaacgccccatgcatcctctaataactcaaaaacttttttatgcgttaaaattccaaggaaaacccctttttcatcaactactgataaataaggcaatttttttattgtaaaaaatactttaaagaaagatgaatcttctctcacaaatccttctttatcgtttaataattgtattacactctcatcaagtgatcctttatattctaaaatatctactttatatatattccctaaaaatttctcttttttttcatctaaaactggtacacaacgataccccgttttatttaaatgctctaacgcttcccctatcgtaatcgaacttgagcacagtaaaacttcccttttcggcacgtaattccctttaatcctcataaaaagcctccttatgttaaaatactttctgtgccataactatattatattttcagaaaaaaataaataatttattttatttttctgaaaattattcattttcttgtcataatttattcatgaatccttcacttgtatatttttgctatcaaatcttctctctgaattactaaatgaaaaatatattgtaacttctttcaaaaaaagctaaaataagaataagaattttctgaatattctaagagtaggtggttatatgtccttattacgctcacatatatgtaaatttataattggtattattgttatttttgccataagtcctattccagctctttttattacacacaattattcttatcaaaatgaatttattagcatttttcaaaacttcgcacagctttcttctatatcaattccaaaggttgattggatgcatgaatctatctttttctcagcaaaccaaatgatacatacttctaatcattcaacaccattattcccttacatatgggaaatatattttatatcgattgttcgttttacttttacccttgcgatcggatttttcataagtttgggtatcggccatttatttttcaaagtacctaattcgtttaaaaagtttactactgtattgaaatggattccttactctttttgcactgtagtattacaatgttcagtcttattactacttctatacatcgcacaatttataaaccttccttactactcatcatttatcatcgtatgtagtacttccatgattatcgttatgcaagcagtaaaaaaatggattcctttcttaaaaaacacaaatgaatatgaaataaaacatgattcttttcttgtggatacattgtttttggcgcttacttcgaatcataaatcaattttaggttccattattctttcattcgtttttatggaatgcgtttttcatgcaaatggactgttacaatttatcgttcaatttggcggaaattcacccataattgttacaatcggcttattactactctatatcccatatagcatactttctttccttcaaacactatggaccacaaactactccaaacaacagtcatacactttgacgagaagtgttccaaaaccttaatttaaaataaccctctataatctaaaagtagggggttattccttttgtatagcggacaaaataacagcaaattcaaaaactattacagaaacataccaatatttacccttttcctttgactattcttttcatttggatttattataaaagtataacataattgcaggaggtgacatctttattccaaaccttggaatggagaacacgcttggacatattaaatatttttctcatctttgtacttattcttatttctggctttttcgttgcatcagaattcgctgttgtaaaagtacgaaaaagtcgaattgaccaacttgcaaatgaaggtaataaacaagctttagctgcaagaagcgtcctatctaatttagatgtttatttatcagcttgtcagctcggaattacaatcacttctttagggcttggttggcttggtgaaccgactgtggaacatatactacgaccgctctttgaaaaaattaatattactggaacaatggctaacactttatcttttgttattgcttttagtgttattacatttttccacgttgtattaggtgaattagttccaaagtctttcgcaattcaaaaagcagaagcgatcacactcaaatttgcaagaccgcttattttatttgataaaattatgtacccattcatttggctactcaatagtacagctatatttttcacaaaattactcggattagaacctgcgaaagaaagtgaacttgctcattctgaagaggaattgcgactcattttaggtgaaagttttaaaagcggtgaaataaaccaaaccgaatataaatatgtaaataacatttttgaatttgatgatcgagttgcaaaagaaattatggttcctcgtaccgaaatgatttgcttatctactgaaaatacgttagaagaaaatatggatatcgtcgctactgaaaaatatacacgctatccaattatcgaaaaagataaagatgatatcattgggatgatcaatacgaaagaagtattccatgatcaaacgaaaggtatttataagccacttgaatcttatatacatcctgttctaactgtatttgaaacagttccaattcgtaaaacgttagtccatcttcaaaaaaatcgcgttcagatggcaatcgttatggatgaatatggtggtactgccggacttttaacgatggaagatattcttgaagaaatcattggagaaattcaagatgaattcgatgcggatgaatcacctatgattgaaaagcgtacacctaagcttactgttttagatggaaaggtgcttatttctgaagtaaatgatatgtttggcctacatattgatgatagtgatttagatacaatcggaggatggcttctttctcaagcagttgacttaaatattgaagctggctattccattgaatatgctggttttcaatttaaagtattagaacttgatggccatcaagtcaaaaaagttgctgtacataaactagatattaaaaaggagctataaagtgactgttttattaacaatttgtatcattgcctgtttcgttgtttcatttctcgcctttatttatccaattatccctggcatactagctgtctgggctggatatttgatttaccatttcggtataaatggaggcgaattaacaacttctttttggattattcaagtcatttttactcttttcattttcgttgctgattttattgcaaatggatatttcttaaaaaaatacggtagttctaaatggggcgaacgtgtcggaatgatttctatcattgtcggatcgttcttcttcccaccattcggacttattatcataccgttcttatcagtatttataacagaactagtgcataaaaaagcgccaaaagatgcctttctagttggagtcgctactgtagttggttttttaagcagtacagtagcgaaagcaattctccaaatcattatgattatcatcttcttgtgttatatcatcttttaaccatcccgacttcgggatggttttttaatatgcaatacctactcgactattttcatatatgtttttcttacatagatcccatgcaaagtgtgctgtatcacccactgtaatttttgatccaccctctggcaatatatctttttcagttcgatatacctctgtcgcctcaccatctattaaatgtgtcggacaaacaactgtccaacataaattattactattacttagtactttatatgcagccaaatgatcttccgctgccgttgtcgttttccttttggattccgttgattgaaaacgatataaatttagatttgttcttgcttgtaaaataccagctgttcctattgttatgattctacgaaccccttcttcttccatttgcttaatgatttgtggcatactcttccctaatgttccattttgatccgttccaagtgcactaattactatatcgcttccttctatcactttctttatatcattttcgttcaatacattaccttctatcactcgtagcctttcatgttgtatttctattctatttaaatcacgcgctaatgcagtcacttcagctgaatcctttaatgctaaattaattatgtttgaacctactcgtcctgttgctcccaatatacatactttcatttgttttccccctctttcattctctttctatttttcaataatctcaataaatttacaacaaaaaagcttcctcatatatgagaggaagctttattattactttatttcttttctttagaatcagtagacttctcggttccgcttgtttctttatcctttttatcctcttgttgtgttgttgtgtcgtcttctttcttcttgtcctcacctttactacaacctaccattaataaagaacttgcaagtgccatagcagttaatgatttaacccatttgttcatttgcgtttcctccttgtgatagaatatgtacaacctcatattactctctatttttaaaggagagattgaaaaatagtaaatatacggtaaatttttgtaaatcttctgataacaaatcctaattttaatttatatatttcatttccaatcgatacacaataaaactagttttttctctcaatggacgtaaaaaaactaaggcgcataccatttcgccttagtttctcatgcaaacttttcattttcatatagatgtgtaatcttatattccttcttcataacatattgccacacactataagcgtaacggttcattttcaggaaacaattttccaaaaatgagcgaaactctggattagcaacttccactgcaacttgagcaaactttaaagctaatcgtttcaagtgcgcaatataactggttgcaatatgaatatcccctgtatatttactaactgtttccttttccatttcatgcaaatcaaactccgttgtttcacaggttatatgttgcacattctctccttcttgaaaatttacttgttcattatatgcttgtaacatatatggtaaatggtgctgtaatagattttttaattcttcgtctctgacctttccagcatactctccaaccttgtatattagtatataactatatctcattaattctttcatacagtccattaaagcgcctcccttctctttcgtccatatactataaatatgatgctaaaacattcgctattcttgctaaaaaccaatcccatctactaattttctcaaaatcttcttcagaaaatcgttttgatttatgaaagtctacctgtaatcgactccatacttcatcaacaacggttttatcatatatgatacagttagactcacaatttaaataaaaacttctattatcaaaattcgctgtcccaatatcaacaatttctccatcaataattgttactttcccatgaaaaaatccatttcgatattgataaatctccgctccagcatgtaacatatctttcaaatatggataggcagcttgttttaacaatatggcatcacttttaaatggcacgagaatttttacattaacaccacgatttaatgcagcttttaactctttcaccatttctttacttggtacaaaatatggtgtagcgataattaaagactttttagcctgctttaatagtgctccatatttttcccataagccttttccatttgaaaataaatattgatatttcacattccctaatgtaggtatactttcatgtataggcattttttctcctgtatcttctttccaatcttcggcgaactttctttccatatccgctgcaccctcaccatggatgcgcacgtgataatcacgccatggcccaaactttggattttgtccaaggtactcctttccgatattaaagccaccgacgtatgatacctttccatctatcgtaacaatacgtctatgatttcgttgatgcaaagaatagaacatatttttcagtttcggttttttactaaatgtaaacttcacaccgttttcttttaatcggctaattacctttttcttcagcttatatccgcctacccgatcgactgacaatttcacttctactccgctagatgcttttttctctaataactgtaaaaactcttggcttatttcatcttttcctacaatataaaaatggatatatatatacttttctgcatcgtttatatcgtcaaataattttctatataactcttcaccgttcgtatatagttgaaattcacctaatcgaacttgtcctaattcatattcactagccatttccttccccatttccacatcgatgttcatccaaatgaatacacctattaaacaaaggattatagcgaaaaagtgcttcatggataaattcctttctccacttactgttatttctatatcttcccttttttattacattatcattcaagaaaatatgtcattgcatgatatatgtccatatcaaacaatagctcatttgcatattgtatgttgtatcttaaaataaaaggaggaaataacaatgggcttcgcacatggtaatggatttgcgctattagtcgtattatttatcctcttaatcatcgtcggtgctgcttgcttctgctaagtagctactgtcatatgatatgtggatgaaaaaactataaaagcggacacctattttaggtgtccgcttttcattttaaaaccatttccgactgctatagtaacttaaatggctaaatattcatctcaaaaggttaacaatgtggctactttcttactctctgccttacgtatatgacgctgttctgcacgtaacacagcaatacgatgtaattctttctcttcttcggtttcagggataacacgcggtactggaactggattattttccttactaagtgccacaaaagtaacgaatgacgttgccgctatacgcttctcacctgaaattaaatcttcagccactaccttcacaaacacttccatcgaagttcttcccgtccaaattacgaaagattcataactaacacaatctgaagaacgaacaggatgtaagaaatcgacccagtccatagatgctgtgacacattcctttcttgaatgtctggatgctgaaatagaagcaaccatatccatctccgctaatatcttcccaccaaatagcgtgttatgatcatttaaatccgttgggaagactcggctcgttttgaacacccttgactcattggctgttttcccctttacttctgtcattgttatcacccctttaatgatctatccctaatatttcaataatcactatactaaatgaactacacgtttaatattaacaacattcagaacttttagtccacaaaaaagaaccgattttatcaatcggctcctctaaatacatattgttctttcggctgttcaactttattccattttgttacttctaatacaggaatattcgcatgaaacggctgataaaactcagtagttatctctccttctacttgaatccagtcatcattattccactctacgccttctggttttttcactaacataccatacacaccagaatctgctacgcaatgtataataccgaaacggaataagaagtattgttcttttttagaagaatcatctctaaaaacaaaccctttaaaagataattttttcccagtaaactcgccaggataattataaattgtttccataccctttaggaagtcttcatctttcaaattaatattgtctttcgtaacaaactctttcttccctttttccattacaccgcggtatccttctttcccgtaataaatgctcgtatcaggtcttaggaattgtcttgtcataaatggatccttactttctgcttgtgcaacaggaaagtgaaagcccttcgctttaacaatatccgaatctagcgtcgcaattgggaaaaataaccctgagataattggaaaacaaaacaatgagtacgaaaatgcttttttccaccatgtattctcatcttttgaatgatcatgcccgcaatggctatgatcgcaactgcaatcatttttctctttttccttttggtgctctttttggaaaacgacgataatttgtataatcgttaagaaacctaaaataattgctgctgttgttgataaataggcatacttcatattgatatacttcgtaatgttaccggaaatatgcagttgcgcaattaatattgtaaaacctaataatatatatgctcgaaacataacctaccaccccatcgcataaatgagtagtgagcttgcataaacaacaagagtaactgtaactataacaacaattacaaatttcgttttaaatgtcgcaagcatcataaacatatttttaatatccaccatcggtccgtaaacgaggaacgcgacaagtgaagctgttgaaaacgtactttggaacgaagaagcgataaatgcatctgcctctgaacaaagtgataatatataagcaagtcccatcataacagctgatgaagaaaatgggccttgtccaatagcaagaagtgttgaagtttgtacaaacgtttgtaccgctgctgcaattaacgcacctagtactaaatattttcccattgagaagaattcctcaacagcgtgtgtacatacatcccacatttttttacgcagtggacgcttattattcacttctgggaagtgatcatctcttaattgatgttctttaaacataaaggataatataattccaacgataatggctacgataatcgctacaatagaacgataccataccatgtgcatactactcccaaaggcaacataagtagcaaataatacaactggattaataataggtccagttaacataaatgcaatccctgcgtatggtggaacgccttttccaattaatcgtcttacaatcggaacaattccacattcacaacctggaaacaacatgcctaaaaaagtagctaataaaacagacagaaatcggttcttcggcatccattttgccaccatatcttctgtcacaaacatttgaatgaatcctgaaataaatacaccaatgagcacaaacggaagtgcttcgattaatatggaaataaaaattgtattcatttgcaggaatgctttcggtaattgaaacaattccatgatgtatttcctccaacttttcattaacaatatgtaattttaaccccatttcattaattggacaaggtttatatgacatacataccctttatatacattacattgtacaagttatattctattcaaaatttgagatttcatagcaaaaaagctgctctagcgtagttatataactatgctagagcagctttcttatcgttaaaagtaacgtttcttccaaaaaacaaaagctaacgtgaaagatagtgttacacatatgatgagtacaattacaaaaccgtgggcttctccttcaaacggaacctttacgttcattccaaagaaactagaaaccatcgtcggtaaagataaaatgatcgtaattgacgttaacagtttcataacactatttaaattatttgatataacggagctaaaagtattcatcattccacttaaaatatgactatatatttccgccatttcaatagcctgtttattttcaattaatacatcttctaataaatcttgatcgtcttcatacatttttaaaaatgtactattacgcattaacttttgaattacaattttattagcctttaatgacgttgtaaagtatactaagcttttctcaaggcctaataatgtgaaaatctctttatttttcattgactgatttaattgatgctctaaatcaattgtttttcgatttatttgctttaagtatcttaaataataagtagaaatcgtatataagagctgaagtgcaaagcgcgtcttcttaaacgtataaaattctttaatacgttgattaataaaacgttcaaaaattggattctcttctaagcagattgtaacaaaacaatccggcatcacaatcatacctattggaatcgtgtcataaatcgaatttccttcttcgtcatgtctaactgtcggaatatccacgataattaaagtattattgtcttccttttcaatacgagagcgttcttcatcatccaaagggtctttaatgaaatctaagtctacatttaaagtttgtactagatattgaatttcttcttctgttggatgaagtacattaatccagcaccccttttgcatttcctcaatctcttgtagttttccgtttcggtctgttaaatatatatttaacatactatcaccccgattctttttacatgtaggaatctacctctcttaaatcacagtttttaaaccgccattctcagcatatgaaacatacgtttaaatttcaatagaaaaattattttgaaaacgtttttataagaaaaatattataaagtgaaactttaatcagtgggagcttcatcccccccactgattttcaaccctcaccaatcgggcttttacggactgcccgcccccaaccaaacttcttttctttcgctgaattttgagatgaggatcttactgcccgttagagcgggataaacatagaaaaagacagagtgctctctgccttaaaagcttatgttgcctttataacatatttagaaagcatccacaagttaaacccgactgaaatcgtatagcccgcgtatgttgaaatgataaaacttacataatcgaaatacggaagcaatacaatatttaaaactatcttcacaataattccaatcactagtcctagcaccgtcttctgctgttgattgattccttgtagcatagcagccgttactgtaaaaagagaaaatagtatgcaagcaggagcataatactgtaaaatgattctccccatctctggatcatttccagcaccaaataaaagggtatatacaggcttggctaacaccatcattccaattgccgccggtaccgtaatcgctactactaatacatttgttctcgtaaaatgtttgtacaatagcttcgtatttcctgctgtataagctttcgtcatctctggtacgagagacatactaaaagctgtcgcaacggataccgggataagcacaaccatttgaacaaggccaattatcgcattaattttttccgcttcgccttgcatataccctatctgtataagtagtttattaattgtaaatgtatcaatcgtctgatacaacggaattgctaagcctactacaacaaaaggaatagaatatgtaaagagctccttataaagtgagaaaaaagatttcgttgtttgtggtatacttgccatttcttttttctttaagtgccttctccttctcatataatacgcacttaaaacagttaatccacctacagctcccataaaggcaccgaacgttgaaataccaactgctagtgaaacagaagcttttaaaacatataaaacgacaaagcttcctattaaaatggttaaaacacgaaaaaattgctctacaactacacttaatgcagaaggccccatcgattggaatccttgaaagaagccccttaataaactcattactggcacaagtattaacgcaaaacttacaattcgaatattagtagtaaccgctcctacactattccccgtttgatcattcccatcgatgacaagtttagctaaatgcggagctagcatatataacgtaaaacacgaaatgactcccattataaacataaacacgattccacttttcaacactctcttaaccgtatgataatcattcagttgatcatattttgataccatctttgaaacagctagcggtaatcccattgttgctatgctgagcatgatggtataaggacgatatgcatatgtgtatagaacgtaaccactcgtaccgaccatcgctgtaaatggtataacatatataaaccctaacatttttgatatcatcgttgccatcgttaaaaatatcgttccacgtataaacggtgaccctttcatcacattcctccgctacgctttattattacacattatggacaactccttttctttagaaccgaaacaaataaaaaagccaatgaaaaatcattgactttaacgcgctgcttttttctttttgaaatactttaaaccaaagtatagagcaataaaaagaacagctcctataattatgtaatgtgtgtaatcagatgcatactctttaatttgtcgccaattcccaccaagtttttcacctaagtatataaatagaattgaccatggaatgatcgctacaaccgtataaagtgtaaatagttttaatggcatcttagctagtcctgctggaatagagatcgcatgacgtactactgggataaagcgcgcagaaaatattacgcctgctccataacgcttaaaccaaccttccgctatgtctaaatgatgtttattaataagtagatatttcccatatttctctacaaccggacgccctccgtagtatccaagccagtataaaaagatttgcgctaaagtaccaccaatcgttccggcgataactgcacccacaaaactaattttaccattcgctactaaaaagccagcatacgaaagtacaatttcactcgggattacttcaatcattaaagcaagagctactccaaagtaacctaagcttgcaaaaaattgcaataactgatctattatgtttgctaacatgttcttttttatctccttttttcttcacataccatcccattattacataaaggctgcaatctgccaatatcttcattttaacaatatgtacaattcaagcaggattaatctattaatttctctttctgcgggtctttcatgtaggcaaacatctctttaatttggtcttctgtatttctagcaattgataaattaggcaattcattttcaccaaaaaactccacctcttctgtttcaatgctagttttcttttctccaccaataatctcacatccaatgaaaatcttatatacatgcgtcgccgatggagatggttgatgtttttctttatcaaatatagctagtaacttaaaatgatctacctcataaccagtctcttcgaaaacttcttttgctgcaacttcggttggcgtataaccgacatcagcccatccacctggcaatgcccatttcccatcgcttttttctttcacaaataataacttttcattttgaaaaacaacagctcttatatcaactttaggtgtttgatagcctgtctcacttgcaaataatttctctacgacttcccaatctgttttcgtgtaatgtgacatcattgaaatagaaatatctcgtaattgctggaaacgctcaatatcatacacatccttagaatacgttaaacccgcttgagctatagattgtatttgttttacccaatcaatccatttaatcgtcatatatccgcatccccattctctatcaaatatattacttcattttcattgatacatctttattatacaaaaaaaaagagattgataacgtttcaatctctttcaaaattaatccaattcatgtaagtggtcttgtatatactttcttctcttatttatatattcataaatcatatcagcctcttgatcaaatgtttctaatttttctttcatgtatggatcttgtagtaaatatggacgaatcaattcacacaacccttctactttcggcctcataaacgaaactgtaaattgatcttctaatatttcttctaaaatacttcgatactgctttctaaatacaggtatgtctagcaatcttgcactcaacgtattatacccttgaatgcgaatatattcatgattaagcggtctcccttgtacatctcgcccccaagtcgcatcataatcccacggtataacttcaaataaatttgtttcatcgttatgatatagtgcatagttatgaacaaaaccatcaaagttttgcgtaaaaataactcctgctaaccatcgtaaatatttatctacatgtagaaacttcccaatttctttttcataggcttccctcgtcaaagtattcgcttgaaatacaaattcactcagttgttcttcactattttcattcgaatatttaaattcataacccgcaaagagctctgtcttaacatctttatctcgttcactcattaatgaaaaattcgcatcatcatctatcgcataataaatagaaccactcggtaatcctctattttttaaaaaattttcatcaaccgattctaactgtaagtacacaccttgaatttgaccattaatttttataaatacatgttgtgattttggcgaaagtacaccaatatcatgaaaaaaatctaaagataatttatttcttatgagagacggatccataaactccgaattcaaatgaaactctttcgcaccttgaaattttttaggcttataaaacataacatgataagactttttctcaaattcccgaatatgagctcctcggtatacgatatcaatatcatacttcttttttccataagttaattttgctggcactggactatctgaccaaatgtcctttttcaattccactaagtacattggatgaacaaaaaaatcatatgaaggcagcatgttttctcatcccttctcagttctcttcattcaatgtatgcgccttgtcttgtccatacatccgcaatcatctatttatataaaattacactcttgtcctgttcagaaagatgcctacatacatatcatgttaaggaaaaagaataccttttcactttaatacatgataaggaggatttctatgaaacgtgatattagaaaagctgtcgaagaaatcaaaagtgctgggatggaggatttcttacaccaagatccaagtacttttgaatgcgatgatgattgcactacaaaaatagagtgtaacgaagattgtaaatgcccaagaacaagatgtactcgcgtgaaacattgtacgttcgttacaaaatgtactcacgttaaaaagtggacatttgttacaaaatgtactcgtgttcgcgtgcaaaaatggacgttcgttacgaaagtaacgcgtagaaaagaatgcgttttagttacaaaacgtactcgtagaaagcattgtacattcgttacaaaatgtgtacgctttgaaaagaaattttactggactaaacgatgttactgtaaaaaatgcgaattcttccctaatggacacggtggctcttgcgacgattcgtgtgatgacggaaagaaatggaacgattgcaaagatggcagacataaattcccatcttgcaaaaataagaaattcgatcacttctggtataaaaaacgtaactgctagtttttataccacccaaaaaaaggccgttttgcggccttttttacatttattgaaagtgacttatatctgcaaattgtttcactttaccaataccctcttcaaattctattatgctcaaactggcactatgcataaatggatcatcccacacattttctatttcaattcccgcgaaatgccctacaagtaattttgctgctgccgcatgagacacaatcaatatattttgtcctttatgcatctctaaaagaagctgcatcccttcaattactctttcataaacggcctcaaaattttcgcctgatgttgactgaaaaagatgtggctcattccaaaacagatgtacttcttctggaaattgcttttctatatccgcgattgtttgtccttcccatatacccatgttgatttcatagaaatgctcatccgctataatgggtatatcacgttccccctttattaactctgccgtatgaagtgttctttcgctcggactactatagatcgcatggattggtaaatctttcattcgatttcctaattgtttcgcctgaactataccattttcagttaaagcagaatttttccgtccctgcattcgcttcgctacatcccactctgtttcaccatgccttgttacatatatagttgttttcatttcttactccccctcaccatgttggtcgtaattcccacggttcaactctccctacaatccactccgctcgtttactttcaatcctttttataattccatcagctatctcttgatgagtaagccaccttccatatgtatcttctaaaataaaacctaaaataattctatgataaatacatcgcgtactccctattttttgtgcaggcatacgtgatgctttactacctaaaatatgaaataaactctatgttttagacgacaaatctagttctttacaaatatttgatagtgcatgctttgcacttgtgtgtacccatgcaacaactaatgtgatcgggccatttttcttaattgtacttttaatagctagctttacatcttcatcattatgataatctaacgaaaggcatgtaatattttctggtgcagaactcattcgcttaacattttttaatttcacttcatctcgtccaataatagaaacataaaatcctttctcacaaagccacatagaaactttctttagcattcctgtcccaccaattacaagtgcatgcaaatgctatccctccctaataaaatgtcatatgaggtttctcatctctataataatttaaacggtcttgcagtgtccctgagtgaaactcaaatttatgaccgtcaggatcaacaaagtatatagattcgcaatctcttacatcacgttctcttccttgtaaaatatgaacatcattttcttctaatcgctgtattagacatttaaagtcttcttgttcaacagaaaatgcaatgtgcgtataagattgatgaatctcatttctcggaatatgcgtctcttcattaagcgctatccatactccacatatgttaaaataagctaattttcttcctttaactaataattctccttctaatactttttcataaaacataatagagttttctaaattagataccgaaaaacaaatatgattgattcctcttaacaactataattcctccttatacaaataaaagatgagcgaaaattcactcatcttttattatactatttttttgtaatatatgcccatttataactgaagtccccgccaaacgtatggttagcaatgccttttacaaatggcttctctaaataagctgtactttgttggtacgtaggagaaattgctgcgtcttgaccaattaagattttttcagcttccgcaagtgcattccagcgtgctttatcatcttttaatagctctccttttgatttcgctactaaatcatcatacttcggattagaataatccatttcattaaatgagcttccagtaacaaacatatcaatataagtcattggatccggataatcagggctccatgcagataatgagaattcatattggaatttcttttctaaatctagcttctgcttgtatggttgctgtttcaaattcactttaataccaggcaagtttttctctagttcttccttaataaagtcgcctacttttttacggctaccgttatcatcgtttagtaattcaaccgtaattgtatcttgaccaagctctttcttcgcttcttcccataatttttttgctttctctgcgttatctttactatcacggaagtttttatttacagagcggaaatcttttccatccggacctgtcgtgaatttttcaggtactaagaaatatgctggcaatgaaccgtcatttaaaatgacatcagcaattccttttttatcgtatgctaaatcaatcgcttcacgtactttttggtttttaaatgttgcatttttttggttaaaacgtaagaaatatatgcgcgggtctaacttcgttttaaattcatctggtttattctttttatatttatcaacaaattcagaagttaaaataactcgatctgcttgatcactatcatataaatttactcccgtgcttgtttccttcacaatacttacattaatttcgtctaactttacagtatctttatcccaataattaggatttttctttaactgataattttgttcatgtttccattgactcattgtaaatggtccattatatactaatttatctgcttctaatccgtatttatctccttgctctttcacatatttttcatttaatgggaaaaatatagggaacgacgtaagctcaagaaaataaggtgctggttgctctaattctactaccaacgttttatcatccttcgctttaacacccagttgatctaatggtaattctcctttatttactttctgtgcatttttcacatcaaataaaatgaatgcatattctgccgctgttgctttatctaatgtacgttgccatgcatatacaaaatcttgtgctcgaactggatcaccatttgaccatttcgcatcacgtaattcaaatgtatatgtctttttatcttcactaatcttcacatcttttgccatacctggtgttggtttattatctttatctagacgatataaaccttccattgcatttacaaatacacggaaagatacagaatccgttgatttagatgtatccattgaaggaatttcagctgtttctagcaaatttaaaacttgtttatcggccattcccttattcgattctttcttcgttgtcgaagccttctcaccattcccacaccctgcaaccaatacactcgtcgttaacgcaagtgcagcaattgttgttgtctttctcttcattcttccttcccccaatctatatgtataagttaaatcctatataatatattttattatacaaaagattctgattattttaaatatttattttaacaaacatagaaaaaagcgatcggaaatttctttccagccgctttcttgaatagcatttacttgtaatccatcctctatatcaaatggattttgaactttaaatatttcttccattagcttcaaaaactcttcttcagttttagattcaccattaaccataaatgagtatggttccacttcacctaatttataatcgacaacaaattgaatcttcaccttttgtcttggcgttccggtgttatatccttggaattctactaattctaacccttccgttccacgataatatatccaacctgaattttgaaaataattttcgaaagattcacctattgaaaagaaaggatattcataaagcgagcttgtacgaaccttttgaataacgtctcgatcagtcggaaaaaagaaatgactaaaaaatatgctagcaactgctaaaatagtaacaattgtcgctcccattttgctcgttccgccgctatcattgattagatagttttcaactgatttatcttttatttctcttgcttttattcggtatatacgtctttccgcaaattgatagtacaatccatttgcaaaaatccccattccaaacagaataaaaatgagtaataaaaacgtaagaggcaccatattaatgattggcaacgctacattaaatcccatataatacgaaaatgcatcacacgctactaataacaacataaataaagcagctggtacataatacttacgatatcctagccagcctatattgaaaatagcagcccaaccattccagctccacctagcaatccgcttattctcaagctcccatttccttttgtaatacggatattgtctccctacatatacttctagttctttatctattaacgagctaccttcatcttgttcattatccaagtttcgctgacaacttgcacaatttaactgttcctcctcgcaaggttgcccacaatttatacatttcaaaacaatccctcttcccatccatacgtcatttcaaaataccttcgtgttttaataaccactctttcctccataaaccaccagcatatccaacaagctttccactcttccctattacacggtgacatggaacaattattgaaattggattccgactatttgcccctcctattgcccgtacagcttttgtatttccaactttctctgcaatatctaaatatgaagcacttacgccgtatggaatagtataaagtgcatcccatacatttttttgaaatgctgttccctccgcagacagcgggaccgtaaactcttttcttttccctttaaaatattcatctaactcatttatacattgttctatcatttcatttttattttcttcttgtcgttcatcaacaaatataacagacgtaattccttcttgattcgctgtaatttcaagcaaacctacttcgctttcataataagcctggtacatatgccatcctccaattcagttcatattagtcattgtaacacgaatatacaaaatttttcgtataagcgttttattagagaaacaaaaaagagaatgatacaatgtaagaaaattcaatctaggaggctattggatgaattccgaacttttttcaccttatacaattaaggacgttacattaaaaaaccggattgttatgtcacctatgtgcatgtattcatcggaaaacggggatggccaagtaacgaatttccatctcattcattatggaacaagagctgccggccaagttggtttagttatgattgaagcaacagccgtgttacctgaaggtcgaatttcaaataaagacttaggcatttgggataacagtttaattgaaggcttacataaaacgactacttttatacatgataatggtgcaaaagctgccattcaactcgctcacgccggaagaaaagcagaactagaaacagatgcgttagctccttcagccattccatttaatgaaacaatgaaaatgccaatagaaatgagcaaacaccaaattaaagatactgtattagcttttcagcaagctgcagtacgatcaaaacaagctggatttgatgttattgaaatacacggtgctcacggttatcttattaatgaatttctttctccgctttccaataagcggactgatgaatatggtggttcacctgaaaaccgctatcgtttcttacgcgaaatcatcgactctgtaaatgaagtttgggacggaccgttatttgtccgtatttcagcaaatgattatcatcctgacgggctaacggttcaagattacgttcagtatacaaagtggatgaaagaacagggaatagatttaatcgattgtagttctggcgcagttgtaccagcacatattgatgtgtatcctggttatcaagtacaatatgccaaacatattaaagagcatgctaacattgcaactggtgcagttggattaattacgaccggagtacaagcagagcaaattttaaataataacgaagcagatttaatttttatcggacgtgaattacttcgcaatccgtattttccaagaatagcggccaatgaacttggctttgaattgcaagaacctcaccaatataagcgagcaccaggaaaaattcatacgaataaataaaaccgagaagtcattcttctcggttttatttattctatcgttgtaatttcatttgaattataagtatggatacccgattcttctcgcagcgcggttatatacatccctttcgccacatctttagctgaaattggtttatattttttgaaagctcctttaaagataaacggaataatacgagataacttttcagccattcgttcgccgaaacgaaattcttgtcgatttcctactaataatgatggtctaaaaatgtgaataccaccaatcactaacttttgcaattcttcttccatttttcctttcacttgtgaataaaagaagaatgatttaggattcgctcccatagaagacacgacaaggaaattttgtaccccttgtttttcagctaaacaagcagctcgtaacgtatattcataatctacttttttaaaatttgcttttgtttttgctttttttattgttgttcctaagcaactaaaaacatcatccacagcaaagaactctttatattcctctaataccgaaaaatcaacttgtttctgctgtaacttctcatgttgcaattgcattggctctcttacaaaaatagtaaccgaatcgtagtaatctgattcaagtaatagacgcgttatctcttgtccaactaaaccacttgcaccaagtattaacgctgttcgcttattcatatatgcatatacctcttattttacttttctctcctttagtaaaatacaacctttaggagtttcctgctcttattttaccacaagtaaaacactatgcgtacgcatagtgctttactcactcttttttctcatctctctcttgtaatttcgttattgttgtagcgtccccatgcccatcaacttaaggatagaaactctacggttttccattaattgaaatggttcaatccttagtagctgcttaatatatttgtctaattttttgggttcagttcataaaatcagtggtcttttaaatgattaagcagctttctgttcagtttgaggaacaggtttttgaagcgagttataaactcctgttccgataacgtctaatgccattctcattcgttcaggtgaaatgttttctaatacgttatcttgaggtgtatggtataccttctcaatatgatagattaatggattccaactatcgacacccatccaaatgaatagagcagcaggaataccagcttcagcaaatggaacatgatcactagaaccgaatttaccttgtaggatgaggttattatttagttgtttacctgcttgcaaggcagcgtctgttacaaagtttgtagagccatcagatgtcatagcatataaattctttgctttatcataatttgttgcaaccatgtcggcgttaaagacacctaaaatacggtcgcgttctttttgggatagactattcacgtaataatccgaaccaagtaatccagtttcttcagaaccaaaggtaataaagcgaatttctttatcagtttctacattttgaaaagcacgagctagttctaatactaatccagttccagaagcattatcatttgcgccaggtgctccgacaacactatcatagtgcgagcttacaacgactgctttttcattacctgtactcttttttggtttctttttggcgataacatttagagatgttaatttagattcatgtctcgcttttagggaaagaattgttgtcccctttttagcgatttcttctttaaatgcatttccttgcgcataagcaagaccaaagacagggatagattgctttttcattaggtggggattgaaggtttgtccataatttccgcgtccgccaattaaactgtataaaagaacaccttttgcacctttgctaacagcattttcaacttgtttattatagtcggtaactgtcgttcctctttcaaataaaacaattttaccgtttacttcatttggaatatcttctaattttgtcccaccttgaacaaagataaggggagctgtaacagcttctgtagaaattagtgcattaggagcggcaccagcttgccaattacgttttgttgataggggtgattcaatgaatccaacgtattgatcgggcacctgaaatggttgatattctacgtcatagcccattgatttaagctgcataccaatgtaacgagaagcccattcttcggattttgttccaccggggcgaggaccaattgtttcagataagaaacgaacatgttcaatcgcgcggtttggatcaatctgttttgtaatagatggagtttgtgtaacctctgacgtggaatccgcttttgcttgcccaattggagctaagctaacagcaagtgatacagcaagcaaagagcttactattttttgtttcaataattttctcattttttcctctcctattcttctattctctctgactgacaaaagaagacggataatgactttattttaccttcacaccttttatttttcaatattctgacattgataaataaaaaaacgatatatgcatatttgcatatttttgagggagatatgtatgctatcattttaaacgaaggttcgctttctactctgaaagctcctacattgcatgaatctagtgtacccaaactttagattatgtagaggaatggaaccactgtagggtttcatttctcatgtttgaatcagttgatggtaattatgtttccgcatttcataattattatcagtgatatatgtaaggcatccatatgaaaataagaggctgttcaaaggttttccgtacttttgggcagcctcaccccgttaaaaggacgatactttatgtatcgtcctttttgtataaaaaaacatccaatcaattgagagattgattggatgtgaaaaaattattaataattttttttgcgttttgtagctaaaatacttaataatccagctagtagaagaacaatacctactgtttgtgtagggtcttctttatgacctgtatttggaaggtgcttatccgtatttcgatcatcttgctgtttgttatctgttttattcgatgtttcttcggaagttccgttttcgtgtttctcagatgtttcattgcctttgttatcttctttatttggaggagtaattggcttgtcatctccacctgaagaagattcaatttttttatttgaaactgtaatttgtagtggcttagcttgggctttatcaattgtaaagtttattggtgatgcatctaattgatagcctttaggagcctttgtttctactaattgataattaccaggtttcaaatcatttacgattacttttccgtgttgatctgtttttaaaccttctcggatgacttttccatcttggtctaaaatattgaaaatggcaccttcaagtgttccatggtgatcaatatcaactttagttaactcaattgaacctgttgttaaactatttaaggctgtaacagaggtaacctgagattgtcctttcgtaattgtgaaaggaattggtttaacgtttaaatcatagccagttggagctttcgtttcaatgaactgataatctcccggacgtaaatcagaaactgaaatcttcccatctttatcagtagttaaatcagtgcgaacaattttacctttcgcatcgatgatgttaaacactgcatcagaaagttttgtatctggatttatatcatccacttttattaattctacagcaccctcagttaagctatttgtagcagtaacttggagcttttctttttggcttttcttaattgtaaacttaataggtgtactatctaatttatagtgttcaggagctttcgtttcaataaactgatagtccccaggacgtaaatcagaaacagaaatttttccatgtacatctgttgtaagctcagtgccaatgtcgttaccattcatatcagtaattttaaatatcgcacctttaagagcagtaccatctacatcatctactttagaaagttccacagtgcctttcgttaagctatttgtagctgtaacggagataggatcagcttggctctttgtgattgtgaatggaattggctctttgtttaaatcatagtgtttcggagccgttgtctcgatgaattgataatcaccaggacgtaggtcagaaacgctaattttaccttgttgattcgtaacaagatctttgcgaattacagtgccattcatatccacaattttaaatactgcgccttcaagagtagtgccatcgacgtcatccactttagaaagttccacgccgccttttgttaaactatttttcatagtaacggtagcaatatctttttggcttttttcaattgtaaatataattggttttttgtctaaatcatagtgttcaggagccgttatttcaacgaattgatacgtaccaggacgtaaattttcgataacgattttaccttcactgtttgtttttaaatctgttttaagtactttgccatcttgatctagtaaattaaataccgcatcggcaagttttgtttgagtgtttaaatcatcaactttaagtaattcgatactaccttgttttaagctatttgtagcagttaaagaaataactttcttctgtcctttttcaatagtgaatttgattggtgtttcatctaaaacgtaatgcttaggagctttcgtttcgatgaattggtaatcaccaggacgtaggtcgttaatttcgattattccttgttcatttgtaacaaggtctttatgaactacatcaccgttcatattaacaattttaaatactgcatctttaagaacagtgccatcaatatcgtctactttagaaagtttaactgcaccctttgttagagcatttgtagcagtgatatgaagagtttcagtttggctctttttaattgtaaatacgataggttttttatctaaatcgtaatgttcaggagcaattgtttcaacgaattgatacgtaccaggacgtagattttcaacaacaattttaccttcagcatttgtttttaagccttcttcaactagctcaccgtctgcatctaataaattaaatacggcgttagaaagttttgtatttatatcaatatcgtcaatctttgttagttcaacgctaccttttttcaaagcatttttgcctgtaacattgatctctttcgtttgacttctttcaattgtaaatggaatcgttgtttcatctaatacatagtgctcaggagcttttgtttcaatgaactgatagtctccagggcgtaaatcagaaacagaaatttttccgtttttatctgtaacaagattcgtatgaacttccttaccattcatatccacaatcttaaagattgcaccttcgagcatcgtacgatcgatgtcatcaatttttgttaatgttactgcacctttctttaaaccgttagtagcggtaacagtaatattctctttttgacttttttcgatagtgaacggaatagggtctttgcttaaggtatagtcttttggagcttttacttcaataaattgatagtctccaggacgtaaatcagaagcagtaattttaccgtttttatcagtcgttaaaccttttcgaattacctttttagtatcatgagcgtcaacgattataaattctgcaccttcaagagtagtgccatcaacatcatcaacttttgttaaagtgacgccacctgtaagtaaactattttttacagtaacagggataggaagatcttccttactaccttttttaattgtgaacttaataggtgttttgtctaatttataatgttcaggggcttttgtttcgataaattgataatcccctggtgctaaatcaggaataactaatactccgtgatcatctgttgttaaatctttcataatttctttgccagttgcgtcttgcaatgtgaatacagcgccggcaagagctttactactttccacatcatcttctttaataagtttaacttttcctttcgttaaactatttttaaatgtaagtggaaggagtttttgttgtcctttttcgattgtaaattcaattggttctacatttacatcgtaataagttggagcctttgtttcgataagttcatagttaccaggacgtaagtcatctacaactagcattcctttactattcgtaacaaggtccgtacgaacatcttcattagtatctctattaacgattttaaatactgcaccttcaagtgtttccttttcatctgcagcattcacttttgttaattcaataccgccttttgttaagctgtttttagcggtaacagtagcctgagttgtttgactttctgtaatcgtaaatttaattggttttgtatttttgtcgtaatacttcggtgctgttacttcgataaatttataatcgccagggcgtaagccagtagcgatagctttaccatccgcaccagtttttacattttcgcgaatgactttcttttcatcattagcatcaacaattttaaatacagcaccttcaagagctgtaccatcgatatcatcaacttttgttaattcaacatctcctggttttaaagcattttcagctttcacaagtagagtttctttctgacttctatcgattgtaaatttaataggttctgctcgtaaaacgtaatgttcaggagcagctatttcaataaatttatacgtaccaggacgtaggttactaactttaactttaccgtttttatcagtagttaagttagtgtaaggggaaacgtcattattatttgtatcgacaagcttgaatactgcaccttcaagtggttttttctcaccaaactcatcaacttttaataattcaacttcgcccgtttttaagctgttatttgccgtaacagtagcaagagcttgttggcttttatcaattgtaaactcgatagggtttgtacttaacgtataatccttaggagcttctgtttcgataaatttataaacaccaggctctagatctttaacggtaacttttccatctgaacctgtttttatattttcacgaattacttgtttctcgtcattcgcatcgacaattttaaatacagcaccttcaagggcagtgccatcgacatcatcgactttcgttaaagtgacaccacctttaatgaggtgatttgtcgcggtaacagtaagtgctttctgttggcttttatcaattgtaaatttaagcggttttttatctatttcataattttcaggtgctttctcttcaacaaattggtactctccaggaagtaaatttttcgcttcgatttgtccgttaccatttgtcgttaatttggtataaccaggaattcttttgttattttggtcccgtacactaaatacagcaccttctaaagtattaccctctttatcaacttttgttaggatagctgagcctctaattaagctgttttgggccgttttattaattactgttgtttgatcttcctcgattgtaaattcaataagtcgatcatctaattgataatgctcaggagcctttatttcttttaagtagtatgttcctggttttaaattatctacagtaatttgtcctttatcatttgttgttaatttttcgtgttctgaaattattttttggtctttatcaagtagtgtgaaaacggcaccttgcagtgtgacgtttttattcaggtcatcagactttgttaaaactactttaccgacaaacttcttatttgcaagtttatatgttgtagtctcttgtgtaccaagttcaacaattttcccttgttttaaatcccagctaattacatagccttcaggagcctttgtttcttttaataaatacttatcgcgttttaaattattaaatttagcgataccgtctttgtctgttgtaattttacggataacagttttacctgtacgatcgtataaagtaaattctgccccagctaatagtgcgtttttattgtcgttatctacctttataatttcaaggtttccacggcctttagtagcagatcctccgcctgaaccagaagacattctcacttcaatcgtttcagtagtttctgtgtttttaactgtcaacttattgcctgtgattttcgctttattacttactttttctttatcgtctgcattaataagtgagcgatattctaaaatataagctcgatcaatttttttcaagaaggcaatttcgaaatgttgttttccggtattattgtctgttgttattttgagtttatagtctgttccttcttttaattcgtttactgtatcttttgttaaatttccatatggatcaacagttgtaggatataagtggaatgaatcttccacaattacctgattttcggttgggtcatctgttacaacggcatctgcaatggttgattggctttcgttaattgcgatactccaattaatatagttgtcgtcttgcacagcttttttagtaacgaagctgccacctttatttacttgagtgtcacctgtaagggtgtttacgattttagagccatcttttaaatctgcctcgtttttgtaggtgccttggataagttcaccatcaaggcttgttttaaagataatatagtaaggtgaattaattgattgtttgaaatgaacctttagggtgtttttattgttctctgtaggttcttcaagttcatatttctcagttggtacagcattaccaggttgtgcattatcaggatttccatttaaaatcatatcgcgcacttcaatggatccaggcactaacttttgtttatcttgtatgacgtctataacataaggatctttaatctcaacattattatagttaaagcctattatccaagtaatttccttcgtttgggcgttataagaaccgtatttataaccatttgcctttgtgaaagtatcagaatcgaaattagcttcaactttatttgattgtggattagaatccgtatctatccaagaaaggttacctgtatttttaaatgaagttttaccactttctagctttgtataatcaaagtctgtcgtatattttacgactaatgtctttgtcatattagactgatacgtacctataagagtaattttgaagcctttatctgttacatctaaaacatagtcagtcccagcttgaagggtataatttccgtctttaatttctagtttcttatcttttaattgtaatccaccatgatcaaaggtgtccgtaataatcgcgttgtttaatggatagttgttattatttactataattgtccaagttgttgttttgtctttataatttgtttcagctttattattagatttaataatattttgctgcttgaagctagcttcattttctttacttgaatcattatcagctgtaactttattttttacttttccatcttctataactttattagttggcttggttttataggtaatcacataagcactattaatatcatcattaaactgtaaatcgaatccattcttcttgttacttacagtgtaattattaacagcgtctcctgttacaagcgttcctttttcattatatgaagcgttttttacaacaatagaatttgcatctagttcgtgtgtatcgtcaaaaatatcttttaaaatcgcatctgcttttttgatctctctttgatcaccattgtaagtaattgtccactcaattgtttgcgtctttggatcatatttacttgttttatttaagtgtgtaccacgagaaaccgttacagtagagcttgcgttttgttgcttttgattatcactcgttatcgtaacgttatttcggaaacttttaatattttcatcagtaatttttgtggcatattcgatttgatatgctttattgatagaatctttgaaagcaatctccaattttgagccatctgatgaaataatattgtaatctgttggctcggcttctgcaccacgcgttacattcccattaacatcaacttctaaataataaactttaatagaatctttatttaagcttgtaccttgtggaatgttatctttaaaaacagcgtttttaagggtgtctttcgttttgttcatctctactttccaattaatttcatttgtattaattggtctatcaggtaaaccctttttattcgtagctgtttgtacattaggcttaaagtcaactgtaatagaaacatccttatctttaatcgggaaaggaatttcttgtgttgttgtacctttaatttcagctttattaaattctgtctttaattgtaggttaccagcaacatctggatgctcttcaacataatcgttgaatgtcatcgtgacttttccatcttttgtaacagtaaaattaccaatttgatggttttcactatcatataaaggactgttaattgtattgtaaatcttaaaatgtttaggaagatcaaaaatatagtaatctccatttttcacattcattgattttaaaagttcccatgtaaactcaatattggcaggggaatctgtacttggacggttatcctctataaatggttttccgtctttatccgtcaactttacaccggttaaaatgtttgttgttatttgctttggacctgaatttgtattctcagcagggtcgcttgatagcttttgttctggattgtcagtagcaattttagctgctgggttttgttccggattatcagtggcagttttagctgctgggttttgttccggattatcggtaacagttttagttgctgggttttgttccggattatcagtaacagttttagttgctggatcttgctccggattgtcagtaacaggtttagctactggatcttgcgcttgtttattagtatcctgtttggtgccatcttctttatagttttctacttgaacaggaactgatataggctgaaccattgttcctaaaggaaaagcgatttgaactgatttttccccaggttttaaagttgggttaaacacggtatcaactttaatttttcctttagcgtctttcaaattttctacttgatcattaaatattaattttaatttattatctttagctgttataaaatattgaccaatatttttttgatctgttactaaatccccttgcaaatctttagatacttttaatgcaagtggtatttgaactactgctgtatcatttgcgtgtgcaacttgttgatcctttattgaccaagcgtattctacttgaatggttgatcctatctttattaaattgttaggattttttgattcgtcaataatatgattcgtcgcatctttcatttcaacagtgtcaaataaggaatctcctgttaaggtttccgctcttacttgattgtatggaaaactagcaagttgcgaaaatagtacgaatacaattaaacatacattaaaaagttttttcatttttcctcctctgaacattcatttgtccattggggacttattccacatgaacaaatggaatattaaaagtatttgttataagctatttatttttgttatccctccgtttctatacgcgttctcagacaaacagaattatgttcaaagcaatattatttaacgtaaaacaaaatgtatatttacacagttctatggaaatatacacaattcgacaaaaaatgtcgaaaaaaatactgatataaataatgatatcagacctttatatgtgagatagttttcatgtatatctagtaaaaaagaatggttataaaggtaagttttacgatacatactaaccaatgtagtgtatccctttgtgaaggcttatttttgccttaaagttatgtggaaataaaaatctagatagggttggttttggtcagaatgaagacaatatgtactttgaaaatagtcatttattttgtctaaagagagtcgtgcgattagtggaccgaagttgaaaggtgatagtttcttacattgttagagaaatataaggattacagaatattcgactaacacgttactacggtcatttttgagcctgtttaaacaataagaaagaaggtgttttactccttagttacaatatctttttagtaaagataagcttaagtaacctccgctaaagattatatacttaaatgataaagagttcaacactagttcacatattttcccaaaaataaaaaacggctgttttatgtggaataaatctacaaaacagccgtttttggtattagatttctgttaagattattggttcaccgcgtgttacgacaacggtatgttcacattgtgcaacaagacttttatcaggtgtaacgaatgtccaaccgtcgtcaccacgttcaataatatgatcagctttcatagagatgaaaggttctacagcgataacaagaccgtcttttagaagtgcattatccattgggtcatagtaacttaaaatgtgatttggtgcttcatgtaagctaagaccaatgccgtgaccagttaagttttgaataacattgtatccacttttatgtgcgaagtttgaaacagcacgaccaatttgattttgttttgagccagctctaacctttttcattgctgcccaaaatgcatcaaccgctgcttggcaaagtttttcttttgcctcgtcttctccaagaacaaatgaaatgcctgtatctgcataatagccatcaagtgcagcagatacatcgacgtttactaagtcgccttcttttaatacacgatctcctggaataccatgagcaacttcttcatttacactaatgcaagttacacctggaaaatcatattctttttcaggtgcagaaatagcaccatgctcatctaatacttttttaccgatcaaatcaagctctttcgttgtcatacctggcttcgcttgttttttcatttcttcacgtgcaagcgcaacgatgcggccgatttttcgtaagccttctaaatcttgttcattacgaataatcatgaaaaccactgtccttcctcgaatatatatcttatccgattgtatcatgtttattttcgtcctgctactcgcttgcggtatgcgggttgattcctctcataaagaatacatgacaattgtcatatcgatgtcatgacgcatcatactgtttcctaagttttccaaggaatacaatgtaaatataagaaacagcgggggtggagagatggaaaagattattgaagtaaatgatgtttctaaaacatttaaacataaaaacgcagtaaataatgtttcatttcatgtaaataaaggggaaatagtagcgttgcttggtccgaatggtgctgggaaaacaacgacgatgtcgatgatgcttgggttaaaggaaccaacggaaggtaaggtctctatatttggaaagagtccaaagcatagagatgttcgtaatagcctcggtgcgatgctgcaagaagtaagtgtcattgatagtattacggtggaagaggcaattgagttattccgtagttattatacgaatcctatagagaaagagacgttactgcagttatcaaatttagaatcagagcgaaagcaaagatgtgagaaattatcaggtgggcaaaaaagaaggttaaactttgcgcttgcacttgcgggaaatccggatttgttatttttagatgagccgacagtcggaatggatattacgtctcgaagaacgttttgggaaacgattcgaaagttagcaagtgaagggaaaacgattattttaacgacgcattatttagaagaagcagatgctttagcaaatcgtatcttattatttgcgaacggaaagattatcgcagatgttacaccagacgaaatgaaagcaacgatttcgagaaaaacaattacattttactcaaaggaaagcattcctacaaaattactaaaggaattaccaaatgtaacagaagtaaagtcaaacgaaggacgcttcattttaacaacggaggatacggatgcaactttaaaagccatttatcaaaggagtttacctgtaacagatgtttcagttgaacgtggaagccttgatgaggcatttgaacagtttgtcgcaaatcagaaggaggaaatcgcatgagagcgttatggatgcagtgcaaaatagaaattttacgtacattccgcaataaattatttatctttttctcattattaatgcccgttatgttttactacatttttacaaatgttgttcaagtaccacaaaacggagatgcgtggaaagcacattatttaatttcgatggcaactttcagtattgtagggactgcactctttagtttcggtgtgagactttctcaggaaaaagggcaaggatggacacatcttttaaaaattacaccgcttccagagggagcatatttaacagcaaaaattatcgctcaaacagtagtaaatgctttttcaatattagttatttttattgcagggatactaattaatcatgttgagttaacggtagggcaatggattggtgcggggttatggttattattaggggtaacaccatttttagcgttaggaacagtaataggttccattaagaaggcggacgcagctgctggcttagcaaatattttaaatatgagtttagctatagttggcgggttatggatgccgattgaagtattcccaaaaatcttaagaacgattggtgaatggacaccaacataccattttggaagtggtgcgtgggatattgtagctggaaaatcaattggatgggaaaatatcgcggtattaggaggttatttccttatatttgttgtagtatcaatatatataagaaaaagacaggaagcggtataaatgatagagaagaagaggattgagatttttccaaaacatatgggattttttccgtacatgtggcttgtgtatttattatttccaatttaccatttagcacaagcatcagggtggaagcttgtgctaggaagcggtatgttgatactttttattatcacataccgtcagctatattttgttcagaagacgtttattttatgggcatgcattcaaatgatactcatctttttatttgctttattttataatccttttatgatattttttggctttttcacagcaagtgcgatgggatttgcgccaaataagaaagtatttcgagtgctgttatgctcgttagttataatgcttggagcatttttatttgtaaatatgaatcaaataacaactacaagtttagtaaatatcgttccgatgtttattttaatgcttcttacgccatttggtatgcgtaattttaatcagaaaaagatgttaagaaatcaattagatgaggcgaacgagcaaattaaagacttagtaaaacgtgaagaacggcagcggattgcaagagatcttcatgacacattagggcatacgttatctcttattactttaaaaagccagcttgtagagaagttaattgtgaaaaatccagagcgtgcaagtgcggaagcgaaggaaattacacaaacttctcgtacagccttaaaacagctgagagaattaatttctgatatgcgtatgattacggtagaagaagagctagagcaaataaaagcgatcttacaagcagctaatattgaattagaagtgaggcaagaagcaagatcgagctcgttatcaccaattgaacaaaatattgtcgggatgtgtttacgtgaggctgttacaaatgttgtaaaacatagtaaggcgacgcggtgcgcagtttctgtattagaatcacaaggtgaactgattttgaaagtagaagataacggaatcggtttaacagatcaaaatcatgatggaaatggtattcgcggcatgaaagaacgaattgctcttattgatggatttgttgaactaggtacaatcaatccagggacgttgttaacagtaaaagttccagttgttattagaacaggaaaagatgaggtgagggcatgatccgaattattattgcagaagatcagcggatgcttcgtggtgcgttaggggctctgcttgatctagaagatgatatcgaagtaattggacaagcggcaaacggggaagaggcgctaaaattaattgaatcgttaaaaccggatataagtatcatggatattgaaatgccgattcaaagtggattagatgttgctgaagcgttaaagaaagaaaaatcatcatgcaaagtaatgattttaacaacatttgcacggccgggatattttgaaagagcaatgaaagctggtgtgcacggctatttattaaaggatagcccaagtgaagatttagcggcagcaattcgtaatgtaatgaaggggaaacgagaggtctcccaagatttaatgtttggcttatggcaggagcaaaatccgttgtcagatcgcgaaaaggaagtattgttgcttgcgaaagaaggaaagacggcaaacgaaattgcgaaggcactttatctttcgccgggtacagtacgtaattatatttctgaagtattagcgaagcttgatgcgaaaaatagaattgaagcaattacaattgcggaagaaaagggatggatatgaaaagaagtttacctatgattggtaaacttcttttttattattgtaccgctattactttatttattttttgtaacggtttgtaaccgtgtgcttcaaatgcctttgcaaattcatttgatacggcagtgccatataaatcttttgcagcttgtacaatatgagattgaagtgattcaaagtcttcagcggaagttgcataattttgcaatgtacgcataacaactttacttactttttcatttccttgcttttgaacagcaacaccgttatatgttttaccttcagctaattgatataatacgtgactgataataccagaatttacgtgtgattcttgattattaccatcgttatagaaatcttgtaaatttgtatataatttatgaccgccgtcaccaatttcctttgggatatcacgaattgttaggccgcctaatgtatcgcccataatccagtttcctttatctttctttacgtaatattcgatttgtgtaccccagaaatccgctaatccctcgtttagtgcagatgtttcagcgcttggatatctcacgactttatttttcgtcgtgccactaaatacagcatgtccaaattcatgagctgttacatcaagagcggatgttagttttccgtctagaccatcaccaaataccatttggttccaagcgggatgccaaaatgcatttacatagtcttcttttacaccatcactaacttcagtagaatcaaaaccgtgtacactagcaacaacttttgaatctttattgtcgtaactttttagattatgttctttcttaaagtaatcgtaaatatcactcatattcttcatagcgcccgcggcttctttatctgcaaaattaggattgctacttgaaattagtgtccctggataaccagcttgactatatcctccgagggaatcggcgtagtttgcattataaatataaataccatttccgcgtgataaatccgctaaataaaatttcccatcagttcctttggcaatattgaaagagatgttttcttgaagtgcatttttcccagttccttgctcacttgcaggggataatctaggtgatgttacttgatttatagtcttattctctttgtttttaatgaacttttcttggaaaagtacttcgccagtttttagatcaacgatagcattgccgtttataatttgttcattgttttcataagtaaatgtaataacagttgcgaatgtataatagccatcttttttcttataaacaacggtttcgctagagaattctgtctcaactgcatcacttggaatttgaactatatcgcgtaatttagattttacttcatttttcgacaaaaaatttgttatagtaagattaggttgttgatttaaattctgaacaactttaccactaacagttgtgatcactccatttttatctacttttacaatgagatcttggccatatactttatagtttttatatgtttgtgcaaggcgaacttcggtttgattttctttagtttctttatttgtaggttggaaatctacatttttttcagtagtgacttgttcttgttgagctttcgccccatttacctcaccttttaaatactttttagcaatattttctttcgtatcattttgaggttgtgttaatttcccgattgttaaaccaggctgagcaatttcaactttgactgcacttttgtctaactcttgagcatgaatagcttctgttgataaagggcaaagaagaccgaatgtaacgaaagcactagcaagttttctataattcatctataacactcctaatctattattgtatgtgagatgaattgtatgaaaaatttgccgaattatatatatattatgcattatttcatatcaaaaattgtcgaattcacattattgtagtggtatgacaacttaaaaaactagattgttataatgggatggtgagtaagtatgcacgcagaaaaattaggaagtgaaattaagaaaattagggtgatgagaggattaacacaaaaacagttatccgagaacatatgtcatcaatcggaagtaagtcgaattgaatcgggcgcggtatacccaagtatggatatattgcaaggtattgcagcaaaattacaagttcccatcattcatttttatgaggtacttatttattctgatattgagaggaataagcagttaaaagatcaaattattctgctttgtaagcaaaaaaaatataaagaaatttataatagagtatgcaatgaattgaaaaaggaagaatatcatcccgagcttcagcaatttcttcaatggcaatattatgtagctgcttacgtattgaaaaaaatcgattacgaatattgcattttagaattaaagaaattgctcaatcaacaactggtaggaatagatgtatatcagaacctttatattgaaaacgcaattgcaaacatttatgctgaaaacggctatttgaagcagggtattgatttgtttgaaaatatattaaaacaattagaggcattgcatgataataaagagtttgatgtgaaggtgagacataatcatgcaaaagcattatacatagacaatcaatacgaagaagcgctttgtcacgcaaataaagccattgacctatcgtgtcgaattaacagtatgacattgattgggcagttatactttcgaaaaggtgaatgcctagcaaaacttgggtgtgatagagcagaaattgaagatgcttacgaaaaagcatgcttcttttttgatatattaggaaaccatgaattaaaagaatcacttataaaaaaaatgaagaaataaaaaagacataaagaacaaatatgcataattgcataaagtctggataatttttcatgatatatttaaagaaaaaatgcgggtgatggaatatgaaaaaactacttattggtagtttactaacgttagcgatggcatggggtatttcattaggagatacagcattagagaaaaaccaaataatttctcataataatcaagagatacaattagctaatgaagtaccttttgagttctaaaaaacaaccgtcttacttagacggttgtttttttatggagtaacatccaaacgtctttactagaaacaggtttgctaataaagaatccttgaatgtgatcacaattttgtttatgtaaaaattcccattcttctgctgtttctacaccttctgcaatcacttttaaatttagttcttttgatagtgtaataatggaagagacaattgcttcttctaaagggctagttgtaattccacaaataaactctcgagcgatttttaatgtgttgattggatattttgttaaataagctaaagaactataaccagtaccaaagtcgtcgattgaaatttgaataccgagattttgaagttgttctagttttgcaactacagattgattttgattaattgcgatgctttccgtaatttcaatatctagtgcttctggtttcagttctgtctcttccaacacctttgaaatagttgggattaaatctgcatggttaaattgaacaacagataaattcacaccaacttttaagtgagaaaaaccttgattatgccatctttttgcttctaaacaggcagtacgtaaaatccaattgccaagttcaataataaaaccagtttcctctgctagagggataaattgggcaggagatacgataccgagttttggatgcttccaacgtattaatgcttcaaaaccgataatttgttttgtttttgtgcttacttgtggctggtattcaaggaaaaattcattttgttgtaatgcttttgaaagttcaccttctaagaattgaatttcattttgagcgatactcatttcttttgagaagaaaacaaatctgttttttccatttgctttcgcacgatacatagccatatcagcatttttcattaactcatttacatcagttccataatcagggtacatcgcaattccgatacttggtgtaatagagagttcttcgccttgaatgaagaatggtttgtttaaaatagttaaaatctgttcagctataaaaattgcacttttttctgagtacatttctggtaatagaattgtaaactcatctccaccttgacgagcgacgatatcttttgaacgcaagcaaccgcgtaatctttttgctacttcaattaataataaatctccgacgtcatgaccaagtctatcgttaatttttttaaatcgatctaaatcaaggaatatgacggcgacatcatttgcgttagtttgagctgtatttaaaatggcttttaaatctttttcgaactttcggcgatttggtaatccagtaagtgcatcgtgaaaggctaaatgttctacttgtttttgtttttcatataaggtggtaatatcacgtgctatcccaaacattccgaccacttctttgtttataaaagtagggataagtgtaatatgaagataataataatagccttcttgttcttttgtccgaacttctaacgtttgtggcctaccttcctttgtaatttgtaaagccttctttagtagttcgtggtcttttgaatcaatgaagtgtaccagagaatagcttgccacttggcaataataggcagtaaataagctttcgcaagccttattagattgttgaaaaatgccattcatatttaaagagaaaacggcatcgggatgatcttcgaataaagacttatagcgttgttcactttttgataatgcaaatgcaccttcttcaacttcatcctctagttgtgtagtcaactgttcatatgtaaggattagtgcttgattatctttccacatgtaaagttgccgcaagaataacaaaataagtgataatacgagaccaattaacataaatttatcatcccaaggttgaatgataataaaggaaaaagtaataattatactaaaataaggtagtataaaacgtacataatcgaatcgataatattttgctttcgtttcatgttgcattggtttatccaagatatatagtatggaagaaagtccaattaataaaatagaagcagtgtgtattaaataattaaattcaggagaagttttcatcccaaaatttaattgaaacagatgaatgtaaccgtatacgagtataatagtgaaaccgataattaatgcgattctactagaagaatattgttctcttctatatagactaataacggcgtaaattactaatgattgtgcaataaaatagccaattaaaatccaagtttcctttgttaacatacggaagcttgaaaggtccaagataaaagttaaagtgaaataaatgttcataataacaataaagatgctatcgaatgaaaattgagcaagacccttaatagagtaaatttttataaactttatagcaaatccaacaaagagtaaaacatattgtatgataaaaaaaggtaatgctttatatgagaatataacttgcttatgaatagaaagtgaaggaagaaataaagttatttccatagctaacccgcatagacaagtacataataataaaatccaaaataatttatcaccatgcgtcatttttctaatcgctttacataagcaatagcaagaaaaaagtgcagcgaaacagaataagaaaagaatcccgatttcttttatattcgactcatttggtataaggaatatccaaagagcaaatataaatatgtatattatgacagattgtatatactttttttgattaatcatattatgactccgtttcaataaagttgaatctcggggagaaaatgctaatttaaataatagcatataaaacagaatgttttttactataaaaattacttttttgaaaaaatggtgcaaagttacaatttaccactgtaacattgcaccacttattcttttaattcctcttatagcagaaagttcatctattaattggaatagtgctaagtctttttgtttactttcaatcataatatcgaaattatgattgtgtttttttgcaatgtgtaagaaaggcttaataaactctaaatcgatatattcagcatgagccctaaattctttttccgatctcggggaggaaatgtgaactttaggagagatatttgtatgtgaccaagtttcaaaaattgcaggaagcaactcttctagtggttcctcgcaaagattggccatatgatgatgataatcaaatacaaatggaatattttctttttggcaaatggataaagtttcagcggttgtataggttttatcatcattttcaagagtcatttgtttttttatatgtgtaggaagtttttttatgttttcatggaagcgctcaattgccttttctttatttccataggctccacctacatgaatattaatgtaagaagaatctgcaatgcctatagcatccaatattttataatgataagtcatatccgtaatagcgttagtagtaatatgtggcttgtcgcttgtaaatagcgtaaattgatttggatgaaaacttattcgtaaattgtgttctttaattaaagcccctattttacgccaaagtggtgtgaataccccatgcccatcaacttaagaatttgcactacccccaagtgtcaaaaaacgttattcaaataccctatagaatagacttttttcaagtgtctattctatagggtacattttaaattgaaagagtcctttttttatttactagatgaagtttgtttcaatacaaattgctcgattgcatgagcaacaccatgttcattgtttgttagtgttacaacatcacatagcttttttacatcttcttcagcgttgcccattgcaacagataaacccgctacttctaacatcggtacatcattaaaattatcaccaatagcaactgtatcttcaatagggatattaaaatgagctgccatctgctgtatcccgtttcctttatgtccattcttatccataatttctaagttagtaggagccgatgctgtaaccataatatcagcatcctcttgtaatatacttaatagctgtgcgcgatgcgctgcattaaacgttaaaatgaagaatttagatatttctagttcttggttatttacaacatcttctatttttttgaaatcagtaattaggttcgatttcttttgcttttctgtaattcgttcaagttcctctaatgtaacatcaagcgcatgcttattttcttcgaatgcttgcatcacttgatcttgccatgtatatggagaataaactcctttatttgtatatagcttatatgggaaaccttcagattctagtaattttgcaagtttgtacactttgtcgttttgtatacaacgcgagttaattacttttccatccacataaacaatagccccattgcttgctccgactggaagagataatttatattcttccaatagctttaaagcatcctctttcgcacgaccagaacagatcattacaatatgaccggcttcttgtgcagtttggattgcttgtaggttttctttggagatttcaagattagatgatagtagtgtaccatccatatctaatgcgattaatttcaaaatgaccacctctttgtttttattatacatagttatatagaggaaacatataaacttatcttggaaagacggtattttatctcatattaaaagtaagtaaagattagataggtttagtggcactaaataaacaatttgtaacaaaaatagagaggaatatgactacatttcactttatgactgtaatgttacacgaatgttacaaacgtgaacttagtgaaaaacgcattaaataaaggtttttgagggttatcataaaaaaacgtaaaaaaagtgtaataaattttacgtaattatattgcaacgtaataatagttatgttacattaatgttacaaacgttacgttatcaaatttaatgtaacgttaacataaaaactatgaaataaacatttcttagaaattacatatagataacttataaaaagggaggataaatgatatgaaagagcaagtattacaagtaacaaaaggtgacttcgtaggatcagcaagtggagcagtagtattaacagcgttaatcgtatttctatcaagcgtattagtataatagaagctttgtaacaaaagaaaaagaagggagaatgaaagatatgaaagagcaggtattacaagtaacaaaaggtgacttcgtaggatcagcaagtggagcggtagtattaacagcattaatcgtatttttatcaagcgtattagtataatagaagttttgtaataaaagaaaaagagaggagaatgaaagatatgaaagagcaagtattacaagtaacaaaaggtgacttcgtaggatcagcaagtggagcagtagtattaacagcgttaatcgtatttctatcaagcgtattagtataatagaagttttgtaataaaagaaaaagagaggagaatgaaagatatgaaagagcaagtattacaagtaacaaaaggtgacttcgtaggatcagcaagtggagcagtagtattaacagcgttaatcgtatttctatcaagtgtattagtataatagaagttttaaattaaacaaaaaaggaaggagaatgagggatatgaacagtgaacaagtgtttcaagtaacaaaaacagatttattaggatccttaggtggagcggtaatattaacatcatttattctattccttgcaaatgtattagtatgagatatataaatacaatcattcaaaaaaaataaagactctaacgtattagtaagtagttaatatgttggagtcttttttatattcttcttatataccctcaagtattaaagttacctcattatccagcattcatggctaattaaacgctgcggttgaaacttgattcaacgaataatcaaaaagccactgaataaaatcccgctttatttcaaagagaaaaaagtcgaattttatatgtaagaaaaaaagaggaatttgacagaaaagatagaaaattttaaaggtcagaatttgttagcttgctaactaatttctattaattaatgttggaagcgttttcggttggttttaagtatggaccatttaatctatttacagggggatgaagatattatgaaacaaaaatctatggatacgctagctgcacaaatggaggacttttttccagtacgtgatgtagatcatttggaattttacgtagggaatgcaaagcaatcgagttattatcttgcgagagcgttcggattcaaaattgtagcttactctggattagaaactggaaaccgtgaaaaggtatcttatgttcttgtgcaaaaaaatatgcgtttcgttgtgtctggagctttaagtagtgaaaatcgtattgcagagtttgtaaagactcatggtgatggcgtgaaggatgtggcactacttgttgatgatgttgataaagcatactcagaagcagtgaaacgtggtgccgtcgcaattgctccaccgcaggaattaacagatgaggacggtacattgaaaaaagcagttattggtacgtatggtgatacaattcatacgcttgtagagcgtaaaaattataaaggggcatttatgccaggattccaaaaggtagaatttaatattccatttgaggagtctggtttaattgctgttgatcatgtagttggtaatgttgaaaaaatggaagagtgggttagttattacgagaatgttatgggctttaaacaaatgattcattttgatgatgacgatattagtacagagtattcggcgttaatgtcaaaagttatgacgaatggaagtcgtattaagtttcctattaacgaaccagcagacggaaagagaaagtcacaaattcaagagtatctagaattctataatggagctggtgtacaacatcttgctttattaacaagtgatattgttaaaacagttgaagcgcttcgtgcaaatggggtggagtttttagatacacctgatacttattacgatgagctaactgcacgagttggaaaaatcgatgaagaaattgataagttaaaagaattaaagatcttagtagatcgtgatgatgaaggttacttactacaaatctttacgaaaccaattgtagatcgtccgactttatttattgaaatcattcaacgtaaaggttctcgtggatttggtgaaggaaactttaaagcgttattcgaatcaattgaaagagaacaagagcgtcgcggaaacttataagatttgtatccaccagcaaaagtccctttgctggtggaaatttcatttttataaggaggaatcaggatgaaatttgttacatttcgtcttccttcaaaagaactacgggctggatggcttgaaggtgacaaagtaatagatatgaatcttgctagtgaagggaaaatcccttcttctatgatagattttttagagaaagcggatgagtatgtagaagtagtgcggaatattaagaatccaaataagggtatatatgctttagaagaagtacaattgacagctgctcttcctaatccgagtagtattcgagatttttacgcatttgaacaacatgtaaaaacagctcgtggacgaagaggattagatgttgtgcctgaatggtatgatattccggttttttattttactaatcatcgtgctgtaattggttccggtgattttgtaattggtccgaaaaagtctaaaaagcttgattatgagttggagattgcttgcgtaataggaaaagaagggcgaaatatttctcgtgagcaagcagaggaatatatttttggttattgtattatgaacgattggagtgcgagagacttacaagcaacagaaatgaaagtaggtctcggtccagcgaaaggaaaagactttgcaacttctttaggagcacatctcgttacgaaagaggaattagacgtttatcgtaatggtgatcgatataatttagaaatgactgctcatgtaaatggaaaactattatcaaaaggaaacttccaagatatttactatacatttgctgaaatgattgaacgtgcttcagaggacgttacgttatatccaggagatgtgattggttctgggacagtaggaacaggatgtattttagaactgggtacagaagagtggctacaagatggagatgttgtagaactgtcgattactggtttaggtacactacgtaatacgatcaaaaaagaaaaggaagcgggtgatgggcatgttttatcgtcacatgggagaactacctcataaacgacatgtacaatttcgtaaaaaagatgggtcgctttatcgtgaacaggtaatgggaacaaaaggtttttctggtacgcagtctattttgtatcatcattatatgccaacagaagtaggtcattctgcattatcgcattcttgtcagttgcagtatgaagaggatgttgctctttctcatcgccactttcgaacgaaagaaagtaaaaaaagtggtgatgcaataagtggacgtaatttcatacttggaaatgaagatttgttaattggagtagtgagtccaacagaaaaaatggattatttctatcgtaatggtgatggcgatgaaatgttatttgttcattatggaacagggaaaattgaaacgatgtttggaacgattcactatagaaaaggcgactatgtaacgattccaattggaacgatttatcgtgttattccagatgaaggagagactaagtttcttgttgtagaggcaaatagccaaattacaacgccgcgtcgttatcgaaatgaatacggacaattgttagagcatagtccgttttgtgaaagagatcttcgtggtccagaaaaattagagacatatgatgaaaaaggcgagtttgtcgtaatgacaaaatcaagaggctatatgcataaacatgttttaggacaccacccgttagatgttgttggatgggatggctatttatatccgtgggtatttaatgtagaggattttgaaccaattacagggcgcattcatcagccaccgccagtacatcaaacatttgaagggcataattttgttatttgctctttcgtaccacgtttatacgattatcatccagagtcaattccagcaccatattatcatagtaatgttaatagtgatgaagttctttactatgtagaaggaaactttatgagtcgcaaaggtgtggaagaaggttctattacacttcatccgagcgggattccccatggaccgcatccggggaaaacagaggcaagtatagggaagaaagagacgcttgaattagctgttatgatagacacattccgtccgcttcgtattgtaaaacaagcacatgaaacagaagatgaaaagtatatgtatagctggattgaacaaggttcatatactgtgaaataagtaaaaaaggcatgctctcaataaggggggcatgcctttttcacggaatcgacatgtataataataccaaaaaaataatggaaagatatatagaaagaataataaggatcgtgcatattcagaagaatttctacttgtttcgacaaaagtattgactaggaaaagcgtaatgagtaaaataaaaaagcgaattaaaaattttcagaaaatttaaaacttggaggagtgaaagatgaagcaaatttttcaaaagaagccaattgcaaagttaatgcatgaaagtaagcaaaaaacgttagcaagaacattgggtgcgctagatttaactatgcttggaatcggagcaattgttggaactggtatttttgttctaacgggtgttgtggcagcgaaacattctgggccagctattatattatcatttgcgattgccgcgttagcttgtgcctttgctgcattttgttatgctgaatttgcttcttcagttcctgtctcgggcagtgtgtatacgtatacatacgcgacgatgggggaagtgttcgcatttttaattggctgggacttaatgcttgaatatttacttgctacatctgctgtagcaaacggttggtctgcatattttcaatctttattaaaggggtttggaattcacattccgactattctctcctcggctcctggtacaggaaagggtggaataattgatttacctgcagttctaattattttagtgatgacagttcttttatctaggggtgttcgtgaaagtgcacgagtaaataacattatggtatttattaaaatagcagttgttcttatttttatctttgctggttttaattatgtgaaacctgaaaactggacgccctttatgccatttggtttagatggtgtaatggctggagcggctacagtattcttcgcatttataggatttgatgcagtttcaacagcggcagaagaagtgaaacgtccgcaacgtgatttaccaattggtattattgcatcgttattaatttgtacagttctttatatcgttgtttcgcttattttgacagggattgttccatacggccagctaaatatatcagatccagttgcttttgcacttcaatttattggacaagatggtttagcgggggtaatttcagtaggagcaattacaggaattacaacagtaatgctagttatgatgtatgggcaagttcgtgtttcttatgcgatgagccgagatggtttactgccgaagcgtcttgctaaagttcatccgaaatttaaaacgccatttttaaatacatggacaacggggattattgcggcactgatttcaggattaatagatttaaatgttttagcacatcttgtaaatatggggacattgtcagcatttgcacttgtagctgttgcggtaatcgtaatgagaagaactcatccagacttaccaagggcatttaaggctccgcttgtaccatttttaccagcattaacagtgattttctgtttatacttaatgcttcagttatcagggacagcgtggattagttttgggatatggatggttattggtatagcggtttacttcttatatagccgaaaacatagtgctttaaataatagtaaaaaagaagaagatgttgcaaatttataagcgaaaaaatccattctaattctgttagaatggattttttatttgaaaatttacatttttctgaacttgttataagataattgttggctaactaaaggggtggaatgatgaaaaatacgtggcgtgagttaagggagatggaccgtaacgtatggattcgatttattggagagacgttaaatggaattgcaatgatgatgttaatgcctttttttgcattatatttaaaagataaggtagattcgttgttggaagttggggttattatggcgctttctccaattgctgcaagctttggatcacttataggagggagaattgctgacatatatggaagaaagcctattatgatattttctatggcaagtaatgcattattaatgctcggttttctatttatagaaggatttattccatatgcaattttatctatttttttagggttgagtaattctttatttcatccagctgcatcagctatggtcgcggatgtaacggcaccagaaaaaagaacagaggcatatggtttattacgaatgggacacaatataggtgctgcgattggtccgataatgggagcatcagtagttgtgttgtcaaagaaccttgtgtttattattgcctcttctacaatgctattttatgcgttacttgtattacttcttattcaagagacgatgccaaagagcatagataaggaagaacataaagaaaaggaatctggggcagtttggaaaattgtaatgcgagataaggcattaatgatttacttattagcaggtattatcatttcgatggggttttctcaaacggaaggcatgctgccactacattttgataatgaaatgaagcgtatttttggaacgaataatccatatccatatttaatggcgttaaacggactattagttgttttattccagtttcaaatttcaaaatgggctacggataaaccagttgggaagacgatgttatatggtgcatgtttattcgggattggattattttttatagggtggttaccgaagtggtttggagaatttaatacaaatgctacaattattttaataacactactgttcgtttatgctatatatacgttaggtgaaatgattatgtcgcctgtacagatgacatttgtagcaaatttggcccctgagcatttgagagggacttatatgggagctgcaagtttgcagtggattacaggaagcgcatttggcccacttttgggaggttttttattagatcggttacttggtcaccttctatttacaattttagctgtaggatgtgtagttgcaggtattgtatatgtttctttagatcgccttgttgagcaaaggcaaaaagacacactaaccaaacaatcttcttagtgaataggtgacatacacaaaaaaggggatttctacatattttaggtacataactagattagattgccattttattttgtgtacctatatagaaaatgaaatgaaaaaccaataagtgatgttatttaattatttatggaagttacattttatttcaaataggaactacctatttttataaaaagtgctaaaatagaaaaatgaaaacaattggttagggtgatttcattgacgaaaattaaattaggtttattatatggtggaaaatcagctgagcatcaagtttcgctacagacggctcttgctgctattaaagcgttaaatcaagataaattcgagattcatccaatttatattacagaacaaggtcaatgggtacgcggtgagcgtattgaaggcgaagtaacagatgttgaagctttaaaaatgagcggtgcagaaaatgcgatttctccgttatcattaagtacagaaattatcccatctgcagcttctgaggagaacgctattgacgttattttcccattactacatggaccaaacggtgaagatggaacggttcaaggactattagaattaatgaatatcccttatgtaggaaatggtgttctagcatcatctgctggtatggataaagttgttatgaaaaacatctttgcagaggctggtttaaaacaagcaaaatatgcatccttcattcgtagtgcatgggagaaaaatcgtgaggaagcttattctaaagtagaagataagttaggatatccttgcttcgtaaaaccagcgaaccttggttcaagtgttggtattaataagtgtaaaaatcgtgaagaacttgaggatgcatttgtagaggcattccaatttgatcgcaaaattattgtagaagaaaatattgtaggtcgtgaagtagaagttggggtactaggtaatgatgagccgaaatgttcagttgtaggtgaaatcgttccgaaaaaggacttctatgattataagtcgaaatatatcgatggtgatacggcgctaattattccagctgaaatgacagaagaagaatctaatgtaattaagcgtgatgcgattattgcattccaatcattagacggtgcaggtttaacgcgagctgatttcttcttaacgaaagatggagaagtgtatattaacgaagtaaacacaatgccaggatttacaccgttcagtatgttccctctattatggcaacatactgggttaccgtatccagaattaattgaagagctaattcgtttagcgattgaacgtcacgaagaaaaacaaaaaattaaatatacaatctaacaaaaaaggaggaagcactattcgtaggaatagtgcttcctctatgtaaggagcgtttctatatgataaagcgaatgttaaagcaagtggaacagatggtaaatggtactggattagcagagcaatatgagggaattactattcaaggcgtgtctattgatacaagaaaaattgaaaaaggaaacttgtatgttccgattcaaggggagcgcttcgatggacatgcttttgtagataaagctgttgaaaatggagctgtggctacattatggatgaaagatgtagcgaatccacctgagaatcttccggttatttttgtggaagacacgctatccgcattgcaaatgttagcgaaaaactatcgcgatcaattggatgttaaagttgtaggtgtaacgggtagtaatggtaaaacatctacgaaagatattgtaacaagtcttcttgcgactaaattcaaagtgcaaaaaacagaagggaacttcaataaccatatcggattacctcttaccattttaaacttagaagaaaatacagaagtagcagtattagagatgggtatgtcaagccgaggcgaaattgaattcttatctaagttagctcgtcctaatgcagctatcattacgaatattggtgaggcacatttaatggatttagggtctcgtgaggcaattgctgaagcgaaattagaaattgttacagggttacaagaaggtggcgtgttcgtatataacggagatgagcctttattaacgaatcgtgttcctgaaatgaatttagcagcagaaacggttacgtttggtgatgcaagagcaaacgattattatccaacgactgtaacattacaagcaactgggacacatttcaaaatgaatagagatgaaaatatttcattctacttacctgtgttaggaaaacataatgtgtataatacacttgcttcaatggcaattgcgaaacattttggtgtaacgtgggaagagatgaaagaaggtttagtaacacttcaaatgacgggcatgcgtatggaaattgtgaaaacaaatagtggtttaacaattatcaacgatgcttataatgcaagtccgacggctatggaagcagcattccatttaatgaatggtttagatggttttgctaaaaaaatcgttgtgctcggtgatatgttagaacttggagatcaagaagtacagttccattatgaggtaggaaaattaatcgatccagcaaaaatctcgcatgtattcacatacggtagattaggggctcaaattgctgaaggagcgaaaattaatttccctaatgaacgtgtaaaggcgtatgataataaagaagagttagtaaaagatttacaagcagtagtcgatgtgaaagatgttgtattaataaaagcatctcgcggtatgaaattagaagaagtaattacgatgttgaaataattggtgtatataaatagggatgatagttacgaaaatagaagaaacttataataagcgcttacagtaaatataaaaaaataaaagtgaagaaaaaaactctgaatatgaaaataaggtaacagttgggtttgctttttacacatacaaaacttataattgataaagtgtaataacgtttagaagtattttcgtgaagaatatacgcccgtttatatacgtgagcattcaggaaaagggcttttccgcaaattcggaaaacgcctttttttaaatgataagtataggatagaaaaggagaagtaacattgacaacatttcgagaattaggattaagtgattctttactgcaatctgttgaaagtatgggctttgaagaggctacaccaattcaagctgaaacaattccacatgcattgcaaggtaaagatattattgggcaagcgcaaacaggtacagggaaaacagcagcattcggattaccactattagataaagtggatacacataaagaatcggttcaaggtattgttatcgcgccaacgcgtgaattagcaattcaagttggagaagaattatacaaaattggtaagcataaacgtgttcgcattttaccaatttatggtggtcaagatattaaccgccaaattcgtgctctaaaaaaacacccacacattattgttggtacgccgggtcgtattttagatcatattaaccgtaaaacacttcgcctgcaaaacgtagagacagttgttcttgacgaagcggatgaaatgttaaacatgggcttcattgaagacattgaagcaattttaacagatgtgccagaaacacatcaaacattactattctcagcgacaatgccggatccaatccgccgtattgctgagcgtttcatgactgagcctcaacacattaaagtaaaagcaaaagaagtaacaatgccaaacattcagcagttctatttagaagtgcaagaaaagaaaaagtttgacgtgttaacacgcttattagatattcaatctccagagcttgcaatcgtattcggtcgtacaaagcgtcgtgttgatgaattatcagaagcattaaacttacgtggttatgctgcagaaggtattcacggtgatttaactcaggcgaaacgtatgtctgtattacgtaaatttaaagaaggttctattgaagttcttgttgcaacagacgttgctgcacgtggtcttgatatttcaggcgtaacgcacgtatataacttcgatattccacaagatccagaatcatacgttcaccgtatcggtcgtactggtcgtgcaggtaaaaaaggtattgcaatgctatttgtaacaccacgtgaatcaggacaattaaaaaatatcgagcgtacaacaaaacgtaaaatggaccgtatggatgcaccgacacttgacgaggcattagaaggtcaacaacgtttaatcgctgaaaagcttcaaagcacaattgaaaatgaaaacttagcatactacaagcgtattgcagaagaaatgttagaagaaaatgactctgtaacagtagtagctgctgctttaaaaatgatgactaaagagccggatacaactccgatcgctttaacatcagaaccacctgttgtttcaagaggcggcggttctaaaaaacgcggcggtaacggaggcggataccgtgatggtaaccgtaatcgtagtcgtgatgcacgcggcggtggcgatggacgtaatcgtgaccgtaaccgtgatggacgtaatcgtgacggaaaccgtgatcgcaatcgtgatggtggtagtcgtggtcgtagaggtgaaggccaaggtcgccctggttcttcaaatggacgcggcgaaagaaaacatcatagccgtccacaagcttaataaaaaaagagaatgccctttgcgggcattctctttttttatttctataattgtgcatactacataatagttatgatagaaaaggggctgttatatgcttgtaaggcttggttacgttgcgatgagtgtacatttgaagaatgcatctccatctcaaacgatgacgtatgcacagtttcagaaattaaatgatcgtgctgctgcaattcgtaaacttgaaagaattgctaattccaatttagaaaattgtttacgtttattaaagcataataaagggcatgacatatctttctttcggctcagttcaaagctcattcctttagcgaatcatgaggaattgctagagtggaactatattcgtcctttaaaagaaaatttaaaaaaactaggtgaatatgcagttcatatgaatatgagaattgatttccatccagatcattttgttgtactaaattcacctgaggagagtgtttttaaacaatctgtaaaaacattgcagatgcacaaaaaattattaaaaggcatggggattgaacataagcaacgatgtgtactgcatgtcggaggaggatataaagataaagaacttgcattagagcgctttatagagaagtggtctaatgtcccaaggggtattcaagaaatgattatattagaaaatgatgatacaacctttacgttagaggaaacattatatttaggagaaaaattagatattcccgtcgtatttgacttgcatcaccatatgatgaataatgagcaagaagattggtatgaagattgggcacgtgtcgttcatacgtgggaaacgtctttgttgccggttaaaatgcatatctctagccctagagagggaaaagatccaagagctcatgcagattatattaatgtagaggcatttttatcttttttaagaaggataaagggaagtgttccgcaaattgattgtatgattgaggcgaagatgaaggatgagtctttatttcaattaatgagagatttaagtgaacaagtagatgtagaaattatcgatggtgcaagcttttatattaaataagctttgcaccatcgttttttttggttaaaaaaggggttaaaatgccaccggttattaaacctgttaaatgactgatcggattggcagaagggttaaagaaagtaaatagtagtaatagaagaatcataattgagaaaatggcaatttcttttggttttgaagagcggtattgattgtacaataaaaataactgtgcacctaatagtccgaaaataccacctgatgcacctgcgtgaatatattcaagcggcataataatataagaagaaatatttccagaaattccagagagaaaaaatagaataaaaaaagaaaagtgtccgagttgcttttcgatagaagaaccaagagcaaacaaaaaaatactattagaaagaaaatgttgtaagtctacgtgtacgagaagagaagttatgacacgccaccattctcctttagcgatatattcattagaggctgccagtggtaagagaaaaaagtcgcctaatatcatcatgactaaatgaataagaagtaaggtaagaatagtcggttgtaaagaaatatgagtggatcttattagcatacggttactttcaccccttttgcatcagaaagattctctgttattcttatcaatatgaaagaagaaagttaaatagaagaaggggatttcgaaatgattatagggattggtatcgatattattgaattaaatcgtattgaaaaaatgctagatggaaagcttaaatttatggaacgtattttaacggaaaatgaacgtaatgttgctatggagctgaaaggaagtcgccttacagagtttgtagctggaaggtttgcagcgaaagaggcgtattcaaaagctgtaggtactggtatcggaaaagaagtgagttttttagatattgaagtgaaaaatgatgaaagaggtaagccaattctgattacaagtacagagtatattgttcatttatcaattagtcatagtaaggaatttgctgttgctcaagttgttttagaaagctcgtcacgctagtctgcatattttatatctttgtctcatatatttgaggtagcgataaggaaggtacatcttccattcatttataggggcaaaggggctgaattgatgaaaaggcgtctgtttttagttcttgtcggtttgttgaccgtttttgtgttggcgggttgtgtggaaaagaagcaagatgatgtcgtgagagatttagaatcaaaagtaaaagggatgaaaagttatcaagctgaggcaaaattatctattaaaacaggcaatgagcctcaagagtataacgtagagatttggcataaggaaccgtctttttatcgtgtgaatttaaagaatgcaaaaaaagatcagagccaaattattttgagaaatgaagaaggtgtatttgtattaacgccagcacttaataagagcttccgttttcaaagtgattggccgcaaaatagtagccaggcttatttatatgaatcacttgtaagagatattttgcaggacaagaaaaaccttacttttgagaaaacagataagtattatatttttaaaacaaaaacaaactatcaacatcaaaatatgttgccgagacaagagattacattgaataagagcgacttgactccagtttcagtgaagttactggataatgatcaaaatgttcttgtgaaagtagatttctctaaagtgaaattcgatgcgaaatttgataaaggtgcatttgatacgaaacaaaatatgtctagagcacaggtagatgttcaaacaacagcgaaagaagacaaaccgtttgctattttgtatccacttgatacaccacaaggtatgactctgaaagatgaaaaagagttgaagacagacagtggcaagcgtgcgatactcacatacactggaaataagaaatcctttactttaatacaagaaaaggcaaaagttgcagaggcatcatcagcggtaagtgtaagtggagaaccagttgatcttgggtttacgattggtgcattgacgaaagactctgtaacgtggtcgcataacggagtagaatatatgctcgtgtctaaaggtttagagccgaaggagctgttaatggttgctcgttcagttacagcgaagcaggtgaagtaaacttcttagacgtggtgatatatgtgcaccacgtcttttcttagtttgaaggtggatttcataaaagaagcatataaaagaataagcttcgcatatcgtgtataaggaagtgtatttatggaagaagcaccattttaccgtgacacttgggtggaagtggatttagatgccatttataacaacgttacacatattaaagagttcatcccaagtaatgtagagatttttgctgtagttaaagcaaacgcatatgggcacgattatgtaccggtggctaaaacggcattagaagcaggtgcaacaaggttagctgttgcttttttagatgaagctttagtgcttcggagggctggtattactgaaccgattttagtgttaggtccctcgccgccgcgtgatgtaaatgtagctgctgaaaatgatgtagcgctaactgtttttcaaaaagaatgggtggaagaagcaattaaactttgggatggttcatctgtaatgaaattccatattaactttgatagtggtatggggagaattggaatacgtgaaagaaaagagctaaaagaatttttaaagagtttagagggtgcaccgtttttagagttagaaggagtatacacgcattttgcaacggcagatgaggttgagacttcgtattttgataagcaatataacacgttcttggagcagttaagttggttgaaagaattcggagtggatcctaagtttgttcatacagctaatagtgctgcgacgttacgttttcaagggattacatttaatgcagtgcgaattgggattgcaatgtatggattatctccttctgtagaaatacgtccttttttaccatttgaattagaaccggcgctatcacttcatacgaaagttgctcatattaaacaggtaattaaaggtgatggaattagttataacgtcacctatcgaacgaaagctgaagaatggattgcgactgtagcgattggctatgcagatgggtggcttagaaggttacaaggatttgaagtgcttataaatggtaaaagggtaccgattgtagggcgagtaacaatggatcagttcatgattcatcttccttgtgaagtgccacttggtacgaaagttacgcttattggaaggcaaggagatgagtatattagcgctacagaggttgcggaatactcagggactattaattatgaaattattgcaacgatcagtttccgtgtgccaagaatatttatacggaatggtaaggttgtagagataattaattacttgaacaatatatagaaggtagtatgattgcttcttgtcattggagtgactgttcattgctggataataagctctttttgatgagaagctttttacttataatcattttttatataagttgcacgtaagttttgaagaggagttctattgtttttagttagttatgagataaaaaatttaagaagatgaatgttttgtttgtgaattggaaaacataagcaaggaataaggaagtctttgcaacaggctccatacaatggtattattacaataggtgtcatatatatatttgggtgtgtagttgacggtggaggtgtatttttgtgtccgaatcaagtgtaactactgaaatcgtggttcggttgccaaagcaaatggtaacggaattggacggaattggaaaacaagagaataagaatcgccatgaactaatttgccaggcaacacaattgttattgcgtcaacataagacgaagaaacgctaccaacatgaatcaatgcgacgtgggtacattgaaatgggaaaaattaatcttggtattgcatctgaagctttcttagcagagtatgaagcagctcatacagtagaacgcttagttagcggggggtaatattttgattgtaaaacgcggcgacgtgtattttgcagacctttccccagttgttggttctgagcaaggaggcgttcgtccggttcttgtcattcaaaatgacatcggaaatcgttttagtccaacggtgattgtagcggctattactgcacagattcaaaaagcgaaattacccactcatgtggaaattgatgcgaaaaagtatggttttgagagagattctgttattttacttgagcagattcgaacaatcgataagcaacgcttaacggacaaaatcactcatttggatgaagtgatgatgagtcgtgtagatgaagcgttacaaattagtttaggactaatagatttttaaatcggcagtttaagttgctctctttgaagggcaactttttttattatagaggaggttacggttgtatatggaaatggtagataatcgacaagcgttaatgaaaatgttagtgaaagaattaggctttaccgaaaagcaagttcgtcatgttattcaattaacagaagaaggtaacacagttccatttattgctcgttaccgaaaagaatggacaggctctttagatgaggtgcaaattcgtacgattttagagagatggcaatatatgatgcaacttgaagataggaaggaagaagttcttcgtcttattgatgagaaggggaaactgacagaagagctacgacagcaaattgttaaagctacaaagttgcaagaagtagaagatctatatcgtccatataaagagaaaagaagaacgaaagcgacaattgctaaagaaaaaggattagaaccattagctgaatggttattgttatataagaaagaagatccggctaaaaaggcagtggaatttattaatgtagagaaagaagtgcaatctgcagaagaagctttacaaggtgcacaagacattattgcagaaatggtttcagatgaagctgcgtatcgtagttggattcgaaatgttacttttagaaaaggtgttatgtcttcgtccgtgaaagatgaagaaaaagatgaaaagaatatatatgaaatgtattacagttatgaagaaccattgcaaaaagtagtaccacatcgtgtattagcaatgaatcgtggcgagaaagaagatatattgagagttgctgttgttccgccagtagatgagatagtaacttttttaaataagaaagtaattcgtgataacgattcgaaaagtgcacattatgtacaattagcgattgaagatggttataaacgattaattcaatcttcaatcgaaagagaaattcgtaaagaattaacagaaacagctgaagaacaagcgatacatattttctctgagaacttacgtaacttattattacaacctccgatgaaagggaaagtcgtgctagcggtagatccggcatatagaactggttgtaaattgtctgtagtagatgatacggggaaagtactacatatcgatgttatttatccgcatccacctgttcgtaaatatgatgatgcaaaaacgaaagttctttctattatagataaatatcaagttgaaatgattgcaattggtaatgggacagcatctagagaaacagaagagtttatagtagatgtattacaaagtgtgaaccgagatgtcttttatattattgtaaatgaagcgggtgctagtgtatattcagcttctgatttagctcgtgaggaattcccaaatttacaagttgaagagagaagtgccgtttctattggaagacgtctgcaagatccacttgctgaacttgtgaaaattgatcctaaatcagttggggttggacaataccaacatgatgtatctcaaaagagactgaatgagtcattaacatttgtagtagaaacagctgttaaccaagttggggttaatgtaaatacggcttcggttgcattgttacaatatgtttcaggtttatcgaaaactgttgcgaaaaatattgtggcaaagagagaagaagatgggaaattcacgaagcgcacggaattaaagaaaatcccgcgtttaggtgcaaagacgtatgaacaatgtataggtttcttacgtatactagaaggagcgaatccattagatcgaacaggtattcatccagagcaatataagaatgttgaattgttattgaagagtctagggttatcgatagatgacgtaggacaaccgcaattacaaaagagattggaagaagtagagatttctaagttatctcaagaaacaggagttggggagccgacgttagttgatattatagatgcacttattagtccagaaagagatatgagggatgagttgcctaaaccacttctgaaaaaagggattttgaaattagaagatttaaaacgtggtatggaattagaaggaacagttcgtaacgttgttgattttggtgcttttgttgatgttggcgtaaagcaagatggtttagtacatatttctaaacttagcaaacagtttgtaaagcatccgttagatgttgtatcagtagggcaaattgtaaaagtatgggtagatgatattgatacaaaaaaaggacgcgttgcactatctatgttgccgattgaatagtaagagaagagagcagatgaaactgctcttttttttatggaataaaaagtgtaatggattatgagctttgatgtattttgctataataaaaccagcattcatttaataatttaatttgataccggtttttttcgaaatatgcacgttgcatttgtttttttagccacgtaggcataggaatccctccttgtttaatcctgctctcaaaaatctaaaatgctattgatgagaggttggtgagtggatttctattcatgttttgtttttagaaaccacgcttcttacatgaggatgggtatatgtactatttaatatatgtataagaagggagaaaagtgtaaaaatatttttttgtttaggaggaatgagagtggatgagcaagaaattcagcgactagtggaagaagtgtcactacaatactttgagatgccgttcttacataaagcagtgtttaacaatagattacgtacaactggtgggcgttatttattgaagagtcataatatcgaactgaattatcgatattacgaagtgtatggtgaagaagagttagtcgggattattaaacatgagctttgtcattatcacttacatattgcaggaagagggtataagcacagggacagggatttccgtgagttgttaaagaaagttgaggcaccacgtttttgtaaacaaatgattaatgaagagaaggaaaaaaagatttataagtatgaatgtatggagtgttcacttcaatatgtaagaaggcgtcaaataaatacaaaaagatatgtctgtggaaagtgtaaagggaaactcaaaccgatatcgaaaacatcttgacagtaaaaacgcaatccagtatattataaacatgtcacgtttgaacaagatgttgttaaaaacttcttgacttacagagagaatttttataagatacaaattgtcttcattattccgcagtagctcagtggtagagctatcggctgttaaccgatcggtcgtaggttcgagtcctacctgcggagccataatcttctgcaatatctagtaagacttgcactgaatttgttccaccttctcggctacacacttccaacatttcatggaagaataccaattctctaaagttaaacgtttcattgaattctctaaatgcacgatgcattgtggttccaccttctaataaaagagaaactttttctatttcttcttgaatgctttcatgcatcattggtttcacctgaactaacacacgttttgcattgttgctaatttgaagtgcatttgctactgccttcatatagatagaaagacggtcaatgacaatcaagtagtaacatttttttcttcgataaagaagaaaccttggaactaaaaatccagataaaacagtaatcagtgtaaaaagatctctaccaaaggaaaaatagaatactgctgcaatactcattccggaaagaatcgtatatacccagtacatactttttgtcaatttccactcgtacttttgggcttcttggataacggattgtggcaaatacattcgtatccctttgatatttcttaattccaagcgcctttcttctttctcattttcttgaacaaattgagaaagagcagaacctttagattttgcaaaaagtaaaacgagcaatcctacactaataaagattaaaaatatacatccataggctaacaaactatgcatactgcacctccttttgtgaaaggaatggcgcataaagagctggatttacagtagaagaacggaatttcttctccatttcagctgacatttttgctgtaatgatatgatctccatgaatctttcctactctctcattcatttcatcgtattcctcacccgacagaataaattgagaaagctgattgaactgtatatcatctcgataatctaacaattcaatcatctctgtaatatagcgattcccatcatctttcttctctaaaaagacaatcacatcaaatgtctgtgaaattaattcatataaatactgagcatcaatattcgcaccactttgcagacacataagcattaaacgtctaaccgcttcttttgcacttcttgcatggacagaggtgaaaccaggatgtcctgtttgaaagaagttaatcatttttaacgcttctttccccctcgattctcctacaattaatcgctttggtccttgacgtaaagcatttgttaacaatctgtcaaaatcgattgcattttcttctacttccgatgccctacattgcatcggaacgaagtgatgttctggaaatatgcgatgtaaatagagttcggggttatcttctactacgagagtacgttctttcttcttcccatttggaatatgagaagcaagatacttcataaactctgactttcctgtacctgttgctccagcgactaaaatattcattttggctttcacagctgcagccaaaaagtgtaacatttctttcgatgcttgattggtagataacatacgttctttagaggcacggaggtgatctgcattcttacgaatcgttattgttgttcctagcccccctagctcatctagggctatattgattcttatatacggaaatacgcagtccacatacggctttgctgtatttaatgactctgatgtactgtttaccatcttataagctagggctttcacttcttcttctgtctcaaatcggtaaggaaatgtacattctccctctccgattttttcgtaaatgatttcttttgtgccattgatataaatatccgttacatccttatcttcttttaaaggttctataatcccaaatccaacaatttcatcacacaccatatttagtaactgttccgaaggtacatctgaaacgacgacttgattgcttagtaaaaagcctttaataatttgctccacagctgttctcttctctttattcataaaggattcgcttaagatatcacgatgttcttttactaaaaatgcacgaatttcatctgtaatatctttaatttgttgagctgtagttgttcctaactttcgaaccgatttagaacgaatcctataaccaaagtgatataagtccactcgatttcgctttaaggatacttgtttttcctgtaaatagccccacatactacttgccacctttttaatttcgtaaaccaaagagaccctttttcatagaggagtgctgggatggaatattaagaccagctacttccataatatgatggacctttgcattaatttgcggggaaccaaattgcattccccattcataactcgtacgatctctgtcatacggaattgtcaccgcaatgttttgggaagaaagcttttcaatatcttctacatagtcctcgtctcccatattcaaaacatgaatcatacgaggtaatgttagctttgcttcttctattagttgtaattctcttttaattgctaacgcaccacgagggttgccatttagcacatgaacaacaaggtctgattggtataggattgggtaactaagcacctcggataattcagttggtaccgataggatgatgtagtcatattctgtatctacaagtgattcgataaatgtcgttacaaacaattctttgttttgaatctctgggaattgagttaaactataacctgatggaaacaccagaaaatccatcttatcgtgtaatttttgcgtcaaccttggattcacttttttttctagtaaatcttgcttggtacaaatatactgcaagagattgtattcattttcttttcttacaagccctagcatatttttactctcatggctaagacctgttccaaccgcgaagtttggtcttacttggtccgcttctacataaagcacctttttccctaaatgagctaactcatttgccatcgcaatacttaacgtactttttcctacgttttcgtttgtcgcataaaaggcaaccattcttacttgccggtccatcttaaaagccccttccttatttggattcgttcagatactgtgcaacatattcttttacacttttagatatgggattggttgaatgcttctctacatagtctaaaatatttttctggtcagatatttgcgagaatccttctgctggttctaattctttccctgtttgttctaccttttgtccaactgcaacaggaattacatctccaagtgttttcgcacgatttagatattgaagttgttctggtgaaacagccaatgtatataatcgcgttacttttggcttttgttttccttcttgttcctcttttgattctttcttttctagtacaaatgcatcttctgtattgctatcctttgcagccgtaacacgtacacgttggaaaagaccaccgaatactaccttctcattgtccccgtccttcacaacctgcttaaaatataagtccacataagtgttaggaatgatactattacctgaacttgtttccaaatcaacaagtaacgggaatgcaacttctccatctttcaaatttaaaatagcagagtcaggtaactcctctttctttactactttatttttaaaaagatagctattttcggtgatgggctgcccatcatttgtccacttacctataacctcttttttacttacacgtaatgcatttggaggaatcccatcaccaggtaatgttcgttccactagcatttcttctttaatctctgtatgcgcaggtatatcctttgcagctacaacaacttttgttggttttactgcattttctactgcaaaatgattgtatccatagatacccgctactgttatagcagctaaacctaccgctgtaatctgcttcttgtgaaacttagacggcttcaatgtttatattcctccttatgtagcctttaaacgcaaaaaaggacacacctatggcgtaaaacgccttaggtgtgtccttttagctaatctaaagtctatatgaaaatgttggatttattttctctaatattacaatctcaatattatgatatatatagtttcatgtcaatcatttctaaaaaatatctgttttttctatttaaaaaccacgtaatcgataattaacctcgctccaaaaaccctgttataacaagatttctaacctattaagcatcccaaaaatatgttgtaattaatctaacacaactgaatattccaaggtgtcggttgctatcctttctctttcattttatggagaaaagaagagatcatttggaaatactgttcacaatagttgatgcaagaggcaaaattattattaaaacgaaatcaattttgttcctgtttcaaaatactttgcaggagcataacttttcccattccgatcctgaaattcacttccaatatataacgatgcaatcattacgataattccaatgaaaattacacgtttcatacgttgttttttctttttatccattcaatattcccctttctacaaaaaaaagacacatcccattaagggatgtgcctttggtttatccattcagctactagtttaagaaggatatcttattgtgttgattcatctaattatactatattttattctcatttcctatttctcatgtaataccaatctgttaatttataaagtacatcttccttaccaacccaattccaaccaactccacttcctccagggaatggatcgtcaggaaatactcttctttttatgaaatcatcatacgcaacacccttaatctctacttgctcagttaaacataaactcatttcattgatacctgctggagctgtttctacattaaaagtgtatacaccatcttttgtcttcaatggtgaataccatttttggccaccatcaataattttctcttgtccatcccaatataaagacttagttggtcttttactatcaaaaacatgtcctgttgcttcagataaatacatatttttaggtaggaatttcgctgtagtatctttaagttctttcttctctaaatcttgagtagactttaatccttcgtctgcaaatgggtattgtgccttagcagcagtaaatacaccagggtaattcgcattccaatcatttttgtacttaccgtttacttcatacgaaaatccataaccagaatgtagcttagaaggagctaaattatcaatactccctgtcaaagtttcataatacatttccccagttatatcttcttttgatacacgttcacttactgtttctactacaccttttacactcgttacaccacacattgccttttcttttgaaggctcatagattgctgttttaataggattatttttgtatgtagtttcctcgatgtctatacggttaccagcagggttaatttccgcttgaattgttcctttacctttatgttgccagtcaagattcagggttttcttttctccctcagttaatcttaccttttgtaaagctacttgttgtccgttatgttttaacacaactactgtttcaggattcgtatatttttcttctaatacatctaactttttaattttattcttctctttttctaacttctgtcttgcattatctagcttacttgccgcactatctagtttattttcttcccaagagcagtctctatcataatagtgatcctttccctcggcatctacttcatgaattggattgcgacgacaataacttaagctggattgtgcactatctctatcagattcagtgctgtttatttcttgctgtgacttattaatattgttgtttacttttgctctatattgatcacgctctagtttaaaattatcacgtgatacatctactcttgttttgatattctttccttctcttgctgtttctccttcaattcggtcagcagagaaatcaattttatatttaaagtcatcttcatcacctggatctgggttaggtgttacttcagtaccgcagttgccatcaatggtgaaatcaacagctttctcatttgattccctctgaacagcatctaggactttaattttcgcagtatattgcccacacaattgcggctgccaggttatatcttcttttttaaattgccctgcatctccttcatttggtttttggttatctttttgtggagttgaacgcagataattttcttggtgatacacggtttcaccatcttttgtaatatctaacatccatttaactcggttccgttctccagcagctttttgataagggtttactgttgttccattgggatctcggtcattgtatcctttatttttacttacatactcaaaacctttaaatgtaaatttaacaggtatatctttttttccactcatagcttgaaagtcttttacttgaggtttacttgtacgtacataccacaggctatatttatttatattacctacaccactagcaccagcgtatccaccagaaagatatgcaatgtcacgaatccaataaaactgtccaagttctctaaaactttcataagtttgtatcatatgtttatccatattttctaaaacgaattctgggtttccccaatatttactagaaataacagaattattaaccctttctacttcagtcaccatacggtcacccgctggtactttactatttaaataaccttcatttgcaattcgaatatacggctctgaagtatcttcagcttgtactaaattctcccttgggttatcccaattaaaagagccgttatatactgcaggaaagtgcacatcggccctgtataaagattctttagctgcatatccacttccaggtctataatattttcctggcaactgtaagttaagtgaagttaaaaacgaatcattttgaccgttatagaatgggacatcgttgtttttagcacttgccatacttggtatagcaagcatagttgaagtacaaataaatagtaaacctctttttaatttcatttctttctcctcccaaaacataaaaaaggacacacctgtaccattgggatggtacgtaaggtgtgtcctttacgtatgcttaattaaatattatattcatattttataatacttagtatatcattattttgtttcaatttgaatatacattgtatcaaaagctgcagtttgaccaatacggactttataattacctttttgataattgttaatagagtcttgcgcaatagtttcatcaatttcttgctctaaattcaatccacttaagaaggtaacccatcgtttagctaattctacagttgctggattattatctaaaaaatagattttataattactatttacagaaccttcaactgcgaattgtgcacctattgaaccagctggaagatacatatctttatccaaaatacgtactcctcctcttaaatctttatatttaagattcgtattgtactttttattaatatcttttactatattttgtgcttctgatgataattgtttttgcacactttcatttttcaaagcttcagggtggtaatcaaagtcaggttgtgcaatctcaacgtctaatccctcaggtactttaggctgttctggtttttcctctggttttgtttctggttttgtctctggttttgtctctggcttagtttctggttttgtctctggctttgtctctggcttagtttctggctttgtctctggttttgtctctggttttgtctctggctttgtctctggctttgtttctggttttgtctctggcttagtttctggctttgtttctggctttgtttctggctttgtctctggttttgtttctggctttgtctctggttttctttctggttttgtttctttttcaactgcattaatagagttgtataagaattggctatattgttcacgggttacatgtgtatatggtgagtacatattacctcctgtaccaatagtaacgccattttcttctaatgcactaattgcttttaatgcccatgagtttttatcaacatctgcaaattttgttgttttcgttgccttaaatttaaaagcatttgtaagcacttgtgccatttgttcacgagttaaaatatcatctggaccatacttcccatcaccaaatccattgacaagtcctgctttagcaagtgctaagatttctttttcaaacaaatgtcctttaatatcagtaaacggatttttgaaactagcatttgcatctgctggtttaacgtacatatagatcatacgagcaacttgcccacgagttacattgtcaccaaagccaaagatattatttccgtacccttgcactactttacgatttgttaaatcataaattgcttttgtagaccagtgatttgctggaacatcattgaattttaatgagtctgtgttatcagccttagcagtaaatgctcctgctcctagtaatgatgtacccataattgttagtgctgttgctgtttttaaaaatttgttagccattgtttgttcctccaaatatattagtttttcatagattcttttattgtacctaatttaaacataaaatccagataatttaacatataaattaattaattaacattttttataacttctgtctatataggtatattttcctgacaaaaaaactatacttttcagcatagtcttttatagtacaaatcttagaattttcattacttaaaatatacttgtcccaatccctctttactcgcccatatcggagcttttatgccatctacaccaatcaacttaaatatgaagaaatggtgttctgctttcaccttaaaagaaagggattgattatgatcgatgcgtccctttgtatactcatacttccatccatccatcttttcttctttcattcttttctctatcccagggactaaatccaccctttttccattgtaatcatattgaaatccacccttattttctgcgttttctaccatatcagcagcaaagttatgtgctttcactaactgtattccgtacaaaacgccttcgggtaaaaggctaattaataataaagaaaaggtaaggaatagagccgtagttactgtattttgcatttttaatgcacctactctttttctttattttacgtttccacctatttgtttttcttttccattcgcatcataaataataatacttctcgctttactctttatcgtttcttttttttcatcaaattgcttaaaataactagcagcttctgcatcactttcgacagcaatcattgctggtttttcctgtacatcatgtacagtgaagttacgttttgaagcgggatctttaaaatccgcattaccgttatacgccttttcaaactcttgtttcgctttttctggatcaatagctatttcttcttctgcacgcagagtacctacttttacagacttagccacagctatctcacctcccctttctaaagacgatttattatcagtatgtgttgtatctccaatcaccatatcagttacaaaggatagacaacctacaaataacagcaacatacttgctgcaacaataaacttttgcattcctcttcagcctccttaactttcagactttcgaaatcgaaatccacttaaaatggaactttttttggaattcaacaattgatttggtagcaataactctgctatttccttcattattccttctaactctttataatagttgcgacttgatagtaacgtactactattcaattgtgactcaaacacatcttctatttcatatggtggtaaagcagttaataccttatctccaaagcattcttctactatttcatgctttaaaagtacaggagaaaacttattcccaatgatcctcactttctctaaacctaagtaagaaacgagctttctctctttttgtgtaagaggatgcgctatctttagcaattgatgcagatctggttccgctacaaagaatatgtaatccgccatttcacatatctcatggtataaatctttatcccaatcgcttcctgcatcaataatagatataggtgcttcctggttggccaataaaaccttaataaaatggtcgaagtcctgctctgtttcgtttttcagctcttggtcaactataggattctttacaatatagtttattcttccttgcttccattttggaattaataatatatcagattccttctgtagcatctctttatatcgctgcaacataaattcactacgatagttttctggcgcttctgtatatccctttaataacggatacgtataaccatcatcatatagattctctatataattcacatcaatctgtagttcatttaagtaagcggctaaaagatgtgaaacaaatgtggcaccacttctcctgttcatgctggccacaacaattgttcgtcttggaatagcaataccaatttgtttctcatatactggctcaaaagccaatttatactgtttttttataattggcgcttttgacgtttcttcctgaatagacttacgcttttgtttgtttttaaataattttaaattagagtgtgattcactgttgttaccttcctctaattcacttgatactttcgcttcttcctcatcaaaaggcacttcaggcaatttcgtatgttgcggtgcttgacttgctcctacaatttccaccacatttttaatatccgattcctgtagcagctgtgggatgactttattatcaatatcaattttacgagagttaaaaatgtcatagatacctagataaatcagtttcgctaaaaattcatcattattttcacgctctgtaaatactacaatgcgaatatcccgctgaaagcgaatgtctcttaacttctgtaaaataattaattctcgcttatcttcgtgtcccgcatcaatatttaatcgtttgtcattaatacatagaatatcaggttgctccgtatctagaatttcatctaaatactttatgtgcatgacatcactatcagctacttcaaatcctgcaccaacaaaatcctcacgtaaatatgccgtatacacagtatcactaatagctaaaacaatctttttcattatgaaaaactcctctttgatagaaaatcactttaaagtaatagcatgttttcaaaaggcacttttgttgcgttttgtatttttgttaataattcggtgagaagtgattctatttcaaatccatccaaattacatggcatattatcaataaggttatatttgactctaacctctaaacgatcctctatttcttctaacggtatcgcactaaataaactttgttcatatataaatccatcccgaagatttttttgtatttctgtcttgtctttgtaaacaatggttacttgtgctaattcaataaaaggattatctaaagttaattttgtattccagtttagactccagatttcacagcggccgtccgcatgcacaacattagcagctacagatggagtaattgtaaataaacgatctactggaacatttgtaaaagtagttgtttttccttcaactactttcagtcctctttcctcacgttcatgctcaagcgaaatttccgcaccaaacaatgcaatttcacaaaatacttgttccattatgggtttaatgccttcatacgttcgaacagcaaatacactaaattcttgtgtttcatccgttcgaactaattcataaatgctaaattccgctgcatttacaattgcaaaaggaatatcttgtacaaaattaggatttataaatagagaatccggaatcactgtctctggatgtttgaaaaactctaaaccaagctgatatccttttagaaatgcattcttagcagcagctgggaataatgtttcaaatcttttgagattgcttttaaattgcttctcttcgacctcgttattaaattctctatcttgtaaaatgtttacacgatcagcaagcagtaaaaaatagtagttaataagagaattaattctctcctcaaaaacttgattatctttacaatatttatcaaatcttcttttactttcactaataatttcattcattctttaatactctccttatcattttctagttattaaataaaaaaagacacaccaatggcaggtatatgccctcggtgtgtccgtttagcaagaattaaatatctctcgatttgtatattaattttaaacaataaaacttatgtataagattatctatataatatctaaatgtcaatactacttcgcaattattaaataaactcacaaaaataatgcttctaattgattaaccttttcttttttgcatatgtcatttaataacctaattcaggtaatactattagtatatctaagtataggattttcataacaaaatttcgatttttttatttacaactaaatttcaaaagtaaaaaacattcatttaatatattccttaccttagagaactttaaatataaaacaatctttatattactcatagcataactaacagcaaacgactaaagcatattaatgttatgtaaacaataaagcgacacaaactcgttcggttgatattaacatatcaactgacattgacatgaaatttcatattgagagatgaatacaagttaaactaaccatccagttcatacctaagccaatttattaattacatatttcgcaaacaaaaattataaaattgcttttaagttcctattttagttattagacaaaaagcacgctaataatgaatatacatccataacatatttttcttgtaacaattaaaatgacttttagttagtatatacttatattagaatgatacacaaaatcatttcttctactcaaatactataaaaactacaatctataattatagattgtaaagatattagctgcactttttttatcatagaaaagaactcatacttatagtatgcccaaataaataagtcgtatacctaagtattacaactgctatttacaaccaaaactcccaatatgctacaccgttctttttataaacctccttgatcaagaaggtttcaaagaaagtctatctccatttaatttttaacacaatttgaagtacacaacccaaatttgttaatgtcatataaacaattaaccaacactaataccctcgaatgaaattaacatatcaattgacattgatatgaaaggaaataaaaatgtacagatgttaatttcatatcgatattttatgtgttatatcaatccgatgatactcagatataaattaacgtaaaaccaattagtagatctacatttattatcattagttactggaatgtaataactaacaaaccagcgcatgctatattttattactaattacttttattaactttttaatgggtatctaagtcataaacacccattagaataactaatatctctaaatgtaaatggcagtttctatttctgatcaacatgacattaacaattaggatgatttatcttttgtttggatgttttttgttaatgtcatattaatctcatagaaatccctcatttcatgtcaatgttatctttatggatattcgaagtatgcttatctaattttcgttaacatatcaatctcattgtcttatttatgaacttattaatatatgcaaacgcacactagaaatcggatatctacaaaatacatcacttggattattctagtattctgagtcgaaccttagtatcttaaaaacttcctcaaaattatctataaaatccttcgtttatggttcacatttcatgttaaaaggtaatctttttagatcaacatgtatacaaagggttgatctatatctattatagttaacaaaacattaacaataggtgttcgtatgttattagtaggtggttttagtgtcggtttcatgtcaatgtcatgtttcatgttaatgtcaactcgcgggctcaatctgttctttaatgctgataaagatcattttgttgatactgactacataaatttctatcacgacatgcaatatacaacttaaattgtacattctacactaaattaatatacataagtagatcctaacttgtatgtggcaagtaaatagggagtaggacgaacctcttcgaagtattatgattgtgctcctatatccttaaataccgttttgtttattgaacaatactaactctacattaatattatttactttttactagtttttatacgtgataattagattttgggcgttactttgtgtattttccgttatatacccggattatatccttataacttatttacaaaatagctttatttccttatcattaatattaagtagcctgatttgttaatctcatagcaactatcaatagcgctactgcaataatatatatattcccattaacaaaacattaccaattatatatttcaaattggtaataaagttactgattcaccgaattctatactaaacgttaatgttctgttaacaagtatatgtttacatgttaattctatatttcatgtaattcactggattggtagggatttttactaatattatcgaaatactagctaacatgttaatctcagctcacatgttaattataattagttatttatgagttgatttttgaggaggtagttacaatgattgagcaaaaaaatgaaaaacaagaccatcaaattaacgatgatgatatattagatgataatgttttcgaaaaagcatggcggataacagaattctcaaaactagtaggacgtcatcataatacagtttataattggttcaatatcctagaagaaaagggacttcatgaaactttaagaactcaaaatacaaatgaaaaactctataatgctttagatcttgaaattgctctatttataaagcagaaaagggatgagaaatggtctctagatgcaattattgaccttttaccacaccaatttgatttaagaccagtttcaccagaacatcaaacaaatgaggtatccactgaattaaaccttcaagctactgctgaaattattgaaaaaatggtaactaaacagttagaagaaaaaataaaacatattgaatctcattatgaagagagggtagaaagtatattaaagcaattaccacaaccagaagatgtagaaacgctaaaattgcgtcaacgccaagataggcttgataattttattattgagcatagggcacgtcaggaattaagaaaacaagcagagagcttatggaataataaacctgaggaagagcgcactagaaaagcaggctggtttaaaaaagaggaagacttgagtaaaaaacaactcttcatagagcagtacatacaagataatattattgagtatataaaatctcttatggattcagtggaataataaaaaagtctggaacttagtccagacttttttattattttgtagtaccaaacatcttatctggatctagaaaatctgctagatcttcatcttcatttgctccagcattattattttcttcgtcactacccatatcaataaaatctccaaatgcaaaacctaaatcctcatcctcatctatactttcaatcgtactaatttgagactttttatactgaatttggctttgtctttctttaaattcattaaattcttcaactaaacctttagataatctcgatggtaatgcatcggttttatagaaggtatatacagttcctaagaaatcattcttacttaccaaatatccattaaaaactgtaccatttataggtaaattatttgaaacttctaccttagcgtcatccataaaggaatcattaatattcttttgctcatctaggatagcaagcataccaaaatgatgtacttttgatgcttcaacagaaccatcatcgttcttcttcatcaaatcaatcgggggatggaaagagcttcctcttaatgattcttggaacatttctataattgcatggctattttctatttgattcatattacgtgaaaccttattaattactaaacagcccgttttctcaagtaaaatacgtttaaaatcttgagaatccagtattacagatgtaccagatccattagcagcggtatttaactcatgaataatttcactaatacgttgatttgcataatctcgtgaattagcaataccttttttctcattttcattcaattccttaaattcatcgtaaaaatgctggttatcagcaaacacaacaaatgctacaccttttgatttatcatttgctaatttccaaatttcctgtgaaaatttatttacttgtcgtaatacatcaggcccatctgctcggacgggaagagttacaacaatccccattttaataaagtctttgcgctcaatagcattttcaaaggctattctcgcaaacttcgcttgattcgccttgatttcagacattggatatagctgcgcaactttttgtaattcttgtctgattactggcttgttatgaaaagccgaaaattcttcaatagccttaatgattgtagaagttccagttcctccacctaaacctgcaaaaaataaaacaagttcatccgaaggtcttactcgttcagtaataaattcttttagcttttcttttgcttcctcatttgaatcaaggacttttactgcacgctcaggattcttacctaaaccacctaatttcagtgaaacttgattacttttgggtacattttttaattcagctagatctccatcattactatttagtgctaagcaattatatactgctgtaccatctgtatgtgtatattccgcaaatttatctaccattctagtaccagcttgaccaaaaccgaccatcgtcattttaactgccacttcattcttcaagaagttttttgccattattttatctctccttatttatcttttttcttttccctaactcaatcagtacttgttgccctctataagttgagatcaaaaatttatatgggtgcatggttttttcatagattaaagacattgatgatagtgtactcacacttatttcagctgaacgtctagatatattcgtacgttcaacctctaaagaataggattttcccttttttttctttactctcctatcaataactacattttccactatttcattaatagatatgcccctcatgtacttcgtctcttgaaattgtttatttactatgtttcctatgtatagaaatacactatagagtatctcatcttgttcaagtatatcagcaaacatgtttactacttcatctgcaaacttgattgtttgatatttttcacttaaaacttcgttcaagtcgtcccccccttaaaacactggttaattattcctagaaacatagtacatcattacacgtcgtatatcaagtcattataaataaaacttatatacaggacttgtatataagacttataaaattaaaaaaagaattaatatatattttataagggtttatgtatacgccttatatataatgcgtatacatgttatatcaatcttaaatttcatgtgattgacatttcaaaaaagattattaaaaaaaccaaatcgaaattctaaaaaacagattaaaaaccaccaatttttttagcataaaaattccagtaaatattatacaccttatatataagctttacatatgaagtgtatagtataatgcttttatatcgtagttaaatcgaaaaacaaattatctagtttacatacaaattttatataagactcttatataaaatttgtatgtaaaccgtatttgtaaagcttatataattcaactaaactttttaaatattccaataataaatattgttcgagtgtatttatattactagggagatttcaagacattcttatagcaattcacactaaggttttctttgttacctagctgttttaacgggatttatcacttataagaccgctcattgttaatgttatgttaatgtactgttcttcacttagtacttgttagttcacattattatatatgttataagaaaaattatcctcttttcctcatttgaattcaattccttgtcaatttcattcattcctcaaaagccagtagaagaggttgttaatttcatatgaacagcatcaataccctcaatattctacatattaaaaagggaggactaggataaatcaactttgacattctaaaagtagtaggctaacaatcacatctctactataaaaaagaaacatttgttcaaactagattattaaaaaggaaatctcatcttattaacatcaaagcgatacttacattacaataatttttttgtaatgcaggaggaatgatgatagcaattacaacctcacataaaattaacaactgttcaattttattatttcagttaagataactccttgtttaacgaagaaaaagtgaaggtaattcaagtgactaaaaccaatatgttaagtatctatagacatattgttaacttatttatgatttggtagaaacaattaatattatttgtctaagtgaatttatgattctatacaagaaaaaacataaaagaaaaagttggaattttagattgagcaaatagcagaagttgaaaagagcgtttcatcacaaataaaaagttgaatttcgaattaaggatagaaaaaattactctttattatcaataaacctttttataaatcttgaataattttaatcaattaaaatagtagtttggctatctaataaatgttaggacgtcataacattattttataaatagaatatcattataactattgttaggtatctagtagtagctcgtcctaacaaaacaaacgatttaataaagccttataaatcaataatttataagagatttataagagtagttttcatctcaacttcaacgtacaaaatgaagtatctctaaaaattaaaatgtcttatttattttttcgggttttacaaccaccacatcaatgtaatagtatattaaaaataataagtatttaatttagtttaattcaatataagaggtgtatgcattgtccgaaaaagtgtataaatatagaagatcaggtacccaaaaacattttcacttaaaagaagctgacatatttgtctttacagttttatattacaaaagagcacttacaacaaggcaaatcacgcagttatatagtgcatttgagggaagagactgttctgaagctagcatatttacaaagcttgaccgttactcacaatatggagctatgctaactaaaagaatagataaaagggctgatagtattacgaaacgcgctttattttccttaaaagaaaagacaattgaattcttattggaaataggaagaattccaaaaaaaagttcaaaaagacggtactcaagaacaacttctcttcacactatgtgttcacgtgaagtcatgatccgtacttttttagcgactacaaagaagacacaaaccaatgaattattatatgaattggatattcgttctttttaccagaaaaaaaatataaaaattgagggcaaccaattggccttgattcctgatgaacatatttcataccaagataaaaatatccatattgagatggacatgtgcaaagagacaaattctaccttagttgaaaaagtagagaagtacatagaatatgcaaaaaaaacaaatgaggatgtaacggttgtctttgttatgtacgacaaatcaatgttccttgctgaagatgcagaaccgccatacatacgtatgaaaaatctattattttctatgcggaagcatcatgaattattaatgaatataccaaatctaaatgtacacatttgctcattgaaagatgctggggatgttatttcagatatcattctaggaacagatgataatcaaaactgggaacaagatattctttttcctttatctcaacgtacagtaggagatgtcaattggcgttacacttttgtcgaaaaaattcaaacgtttaaagaatcaatagatggtggccttcgacgcacatacaagagagataaagcttctattcaagatttcttttttatttttggaaatgaaaatgattaccgaatgattgcaagattagatgatgtcgtgttttcaagaaggaatggagatgaaggcattccgcttgtagttatctatcctaaacgtgaaaatcctagagatattctactgatggacacttatgataatgtactacttctatccattcaaaatacaaatatagcaaccgatgaacagatcatggtacatgctgcaaataacgttaatccgaaaagacgtaaacttgtagaattatattaatcgtttattttttatatacttttatataactttattgatttttattatttaaggtgatagaataacgtttgaactaaacactcaaaactacaatcaaatcagaacatatgaaattaaggcaagcgacacacgctgtttttacagtgggtgtcgcttgcctttttttgtatggagaaaggtggaagtggaaaatgacaatgaacttacaatttgcaacaactactgggggagtgctctcagcaagagaagcatttaaaactccagaactagtccttaaacatattacagaagggggagctaaattttgcgtttccctacaagatatcaaaattccagggaaacctaattattattggtacgatgtaataattgaaactgcggcgaataacaaactagagataaatattgcagtactttctcaagaagaatataaccaattgtgtgaaggagatagtattgacttatatttaaaacaaactgaagatgcagcgaagttctttctaaaaaaatcaaaggaacaattcaagccagaacttcataatcgttttacattacaccataaagctcaactatgtctttaaaaagtaggtgaacccttatggagagatctaagcaaagattaccattatacactacaatcgccttaattagcggatttatcctttcatttggatttggtgtagcaaactacatccagttactctactatgcatttgaaccaccgtcttatcctatagaaattacatatgtaccactatttttaatgttcttctctttgctattaggagaatttagttttaggttctacagccgtatcccagctttacaatttcaaaatggcaagttattaattttaattgcttctcatattgcagtagatattcagtttttatggtttgcaactactcctatccatgcgaaagttattccttatcttatgaataaagcaaaacatgttaattttggtgaatatcaagcaataggggatgtattaacaggaaatttccatacactcaccatgatatttgtattcttaccgaccgtatttatgattttgtttactctttggtatagtggccatattatccgttacagagaagaaatcttaaagtgggtacaaaaatacgaatataaaaatcataagttgcaaaagtggtttaatagccaagaggaacaaatacatcctgatgttgatataggtcctcatattaagcacaaagaaatgattcgaatcaaggggaaagatagaaccctaaatggaattattattggtcctattggttctggtaagacatctagtttaattattccaatgattaatcaagatttacactggatggtacgttttataaataagtttgaaaatacgtataaaaagaataattatgatacagaagaagtaaaaggaacatttttaaatgggataactgttattgaaccgagtaatgatttatgtcaaaaggtatttaagttagtacaagcacacaagattcctgaaagttcaatttattatattgatcccacaaaccctgataccaaaaacattaatattttacgtggaccagttgataaagtagccgaggtttttgcaatggttatccagggtctgtcggaatctaataatgcattctttgaacaagcacaacggaaccaccttaagcaacatatttatttattaaaactacataacccacaaaaagatgtgacctttgatgacttaatagatatgtacgtgcgtgtaaatgtcaagataaacatgtacattttcgcttgtttaagcatgtacaaaatcgaataacgttttttgacacttgggggtagtgcaaattcttaagttgatgggcatgtgttgttacccctaaaatagcaatttttatattggattcaatctgtttgattatataaggttttccgaaataaggtttctttatgtttttatctaaaatgtttgctgataggtacgggaagttcgcagtagtcacagcattatttaatatatccatcccgtaattaaattcatgattgccgataattgcagcgtcatactgtaagtaattcgctaataaggacattgggttttttttgtttttttcgtatgtaacataatgataagtaaatggtgttccttgaataaagtcgccattatcaattaaaagaacgtttgtattttgggaacgttctttttttataagagtagaaattttagctaaaccaagttctgctggggagttatcttggtagtgaataggataaacagtgccatgtatatcgcttgttaataagatgtttaaagttacagtttgattttgttccaatatgactcaccttttctattgttatcttccaattcatcatatcaaatatgtgaagagaattttaatgtgagtgtatagaatgtgtaaagattctgtaaataatcaattatttgtaaaaatatgtgatatatttcttcatgtttatgaaaggttattttataacaatgaaaaatggaggcattaatatgttgaaaaaagtttttgcaatgagcacaacagttgtactagcagcgggattattaagtggctgtggaacgaaggaatcaagcgcaagtaaaaatgaagatacgaaaaaagggtatgtaccgaagactttaaatgttcaatttgttccttctcaaaatgcagatacgttagaggcgaaggcaaaaccgcttgagaagctattaagtgataagttaaatattccagtaaaagttagtatttcaacgaactacaatacaattgtagaagcgatggcatctaaacaagtagatgtaggatttttaccgccgacagcgtacgtattagcacatgaaaagaaggctgcaaatgtaattttacaagcacaacgttttggagtagagaatgaaacaggagcccctacaaaagatttagtagattattataaatctgagtttgttgttaagaaagattcaaatattaatagtgtaaaagatttaaaaggtaaaaaaattggctatcaagatgtaacgtcatcagcgggatatgtgtggcctgcagctgttctattaaaagagggaattgatccgttaaaagatgtgaaacctgttacattaaaaggtcacgatcagtcgcttattgctcttttaaatggtgacgtagatgcggctgttgtattccaagatgctcgtaatattgtaaaaaaagattatccgaatatatttgatcaaacgaaaatagtgaaatttactgagaaaattccgaacgatacaatttctgtacgatctgatttagatgcagaatggagcaagaaattacaagatgctttcattgaaattggaaagaatgaggaaggccgtaaaatcattaaagaagtatattcacatgaaggatatgttaaatctgatgatagtaaatttgatatcgttcgtgaatatgggaagaaagtaaaaacgcaataatacatatggaaatggcagctagctgaaaggggatgttttcagttagtttgccgttttgaatacatagaaggtaggtaagatgtgtgatagagtttcgaaatgtctccaaagtgtatccaaacggtacaaaaggattgaataatataaacttgaaaattcaaaaaggtgagtttgttgtaatggtagggctgtctggagctggaaaatctacacttctcagatccgtaaatcgtcttcatgagattaccgaaggagaaatcattattgaaggtgagtctattactgctgcgaaaggaaaaggattaaggcgtatgcgccgggatatcggtatgatcttccaaagttttaaccttgtaaagcgatcaacagtattaaaaaatgtattagctggtcgtgttggatatcattccacattacgtacaacgttaggtttgtttccgaaagaagatgtggagctcgcatttcaagcgttaaaaagagtgaatattttagaaaaagcatatgcacgtgctgatgaattatcaggaggacaacagcaacgtgtatcaatagctagagcattggcacaagaagcaaaaatcatattggcagatgagcctgttgcatcgttagatccacttacgacaaagcaagtattaaatgatttgaaaaaaatcaatgaagattttggaattacaacaattgtgaatttgcattctattgatttagctaggcaatatgcgacacgtattattggattacatgcaggagaaattgtttttgatggttcagtagaagaggcgacagatgaaaaatttgctgaaatttatggagatgtagcacagaaaaatgaattgttagaggtggcagttaaatgagtgacgtaacgatatattcgaaatcgataccgaagccgccgagtaagttgaaacatatgttaacgtttattttagttattttaatgctgtggagtagtagtgtacaagtagatgcatcattttcaaaactggtagacggttttcccaatatggtagatctattgaaagagatggtgccacctgattggagttattttcaagttattacaacagcgatgttagatacaatacgtatggccattattgggacgaccttaggagcgattttagctattccacttgcactgtttgcagcaagtaatgtgtttactaacacatttttatacagtctagctcgaatgattttaaatttgatacgaacgataccagatttattattagcggcaattttcgtagcgatttttggaattgggccacttccaggtattttggctcttacttttttttcaattggacttgtagcgaaattgttgtatgagtcaattgaatcaattgatccaggtccgttagaggcgatgacagcggtaggagctaataaggtgcaatggattgtttatggggtaattccgcaagtgaaagcacattttgtctcctatgttctttatacatttgaggtgaacgtacgtgcagcagctgttttaggtttagtaggagcaggtggtattggactatattatgatcgtacacttggatttttacaatataaacaaactgcttctataattatttatacccttattgttgttttgttaattgactacattagtacattgttacgggagaaactataatgaatagaacgacgatgattgtgccaaaaccgaagaaaccgagtatatatcgctggattattttaatagcacttacagttgtatatgtatgggccttttcaggagtaccattagaagggataaaggacacagcaggtgaaatcacgaaagcaattatgacagggatattaaatccagactggtcgtatgtatctttgccagatggtgaagatttattacatggattaattgatacgttggcaattgcgatattaggtacatttatttctgcatttttatctgttccgtttgccttttgggcggcaacgaatatgagtattggaaaattaacttcaggatctgggaaatttgtgcttagttttgttcgtacgtttcctgaattagttatggctcttttatttataaaagctgttggtccaggctcttttgcaggagtattagccttaggattacattctattggaatgttaggaaaactatattcagaaggaattgaaaacatagataaaggaccgacggaagcgttactagcaacaggagcaaaccgttttcaaatactttggtatgcggtgttaccacaagtgttaccagattttctatcgtatacgttatacagatttgaaattaatgtacgatccgctgcgattttaggggttatcggagcaggagggattggtacacctttaatttttgcgctgagttcacggaattggtctcgtgttgggattattttattaggtattattttaatggtaattataattgatttgatttcaagctcgattcggaaacggattgtttaacttatttgaaaagcatcgaagttagatgctttttgtgtttttaaaaacgtattaaaaaaagtaagtatagaagaaatttgtataaatatacagataattccctttctttttaaaataaaaataatgaaaaagtatgtcatattgaatgcccatacattcccgggaacattgatttttttataaaaaaccaaaaaaatatcaacatatttgtcgatacatgttgtataatcttgcgtgggaagctatcatataaatgtataaaacgtttactaatataagcgaagggaagaatagcatgtcacattcaatcgaacaactttctatcaacacgattcgcacattatccatcgatgcgattgaaaaagcaaactctggtcacccaggaatgccaatgggtgcagcaccaatggcttatacattatggactcaatttatgaaacacaatccaaataacccaacgtggtttaaccgtgatcgtttcgtattatctgcaggtcatggttcaatgttattatacagcctacttcacctatctggttatgatgtaacaatggatgacttaaagaacttccgtcaatggggaagcaaaactccaggacatcctgagtacggtcatacagctggtgtagatgcaacgactggtccacttggacaaggtattgcaactgctgtaggtatggcaatggctgaaagacatttagctgctaaatataaccgtgatgcgtatagtgtagtagatcattatacatacgctatttgtggtgatggagatttaatggagggcgtttctgctgaagcatcttcattagctgctcatttacaattaggtcgtcttgttgtgctttatgattcaaacgatatttcattagatggcgatttaaatcgttcattctctgaaagtgtagaagatcgttacaaagcatacggatggcaagtaatccgtgttgaggatggaaacgatattgaagcaatcgcgaaagcaattgaagaagcgaaagctgacgaaaaacgcccaacgctaattgaagtaagaacgacaattggtttcggttctccaaacaaatcaggaaaatcagcttcacatggttctccacttggtgtagaagaaacgaaattaacgaaagaagcatatgcttggactgctgagcaagacttccacgtagcagaagaagtatatgacaacttccgtaaaacagtacaagatgttggtgaaactgcgcaagctgagtggaacacgatgctaggtgaatatgcacaagcatacccagaattagcaaacgaattccaagcagcaatgaacggtcaacttccagaaggttgggagcaaaacctaccaacttatgaattaggatcaaaagcagcaactcgtaattcttctggtgctgtaattaatgcaattgcagagtctgtaccatcattcttcggtggatctgctgaccttgctggttctaacaaaacatacatgaataacgaaaaagactttacaagagatgattacagcggtaaaaacatttggtacggtgtacgtgagttcgcaatgggtgcagcaatgaacggtattgcactacatggtggtttaaaaacttacggtggtacgttcttcgtattctctgattacttacgtccagcaattcgccttgcagcattaatgcaattgccagtaacgtatgtattcacacatgacagtatcgctgttggtgaagatggtccaacacatgaaccaatcgagcaattagcagcgcttcgtgcaatgccaaacgtttctgttatccgtcctgctgatggtaacgaatctgttgcagcttggagacttgctttagaatctacaaacaaaccaactgctttagtattaactcgtcaagaccttccaacattagaaggtgcaaaagatgatacgtatgaaaaagtagcaaaaggtgcatatgtagtttctgcaagcaagaaagaaacggctgatgtaatcttacttgcaactggatctgaagtaagcctagctgttgaagctcaaaaagcattagcagtagacggcgttgacgcagcggttgtcagcatgccatctatggatcgcttcgaagctcaaactgcagagtacaaagaatctgtattaccaaaagcagtaacaaaacgtttcgcaatcgaaatgggtgctacattcggatggcaccgttacgtaggtcttgaaggagatgtgttaggtatcgatacattcggtgcttctgctcctggtgagaagattatggaagagtatggatttactgtagagaacgttgttcgtaaagtaaaagaaatgctttaatgatttcagaaaaatctctccggcatggagaggtttttctatgtaaatgagttttttcgacagaaaaagttttttatctctccgcagtcagacaatcattgcaaattttcttatatataatgaagagaaaaggttgtccagattgggagtggaaaaatgaaaacgtatgaattgtatttaattcaagaggatattgcgaaagcttattttggtcgtgaatatttgttttttgatttatttgctcgattttcagaatctgggtccctttcggagaaaaaagtgttatataagcaaatgatgtatataacgatgccattgcaagtaatgaaaattcatcataaattagaacaagctttgcgcgttcttggtaaatatgatagaacacatcatacacatacactttatacgggagcggagtacggcgaaataatggtgaaaccgcactatattcgtatgaatacctctggaaatgtctctatggaaacaacattctttgaggtgttaagaaagtgtgaattaacatttttagctatggattatgaaaatacaaagtacggatggctgaatcctctaaaacaagtacgaacatatgtgtaaaaaatgtcgaattgtatcttgtcttattgaaaaggttttagtacactgtaaggtagacaacatgaaggaggaaaatatatgccaatttggttaggtattctagtgggcgtagtagcactagtagcaggcgtggcgttaggatttttcattgcccgcaaatatatgatgaattacttacaaaaaaatccaccaattaacgaacaaatgttaaaaatgatgatgatgcaaatgggacaaaaaccttcccaaaagaaaatcaatcaaatgatgagcgcaatgaacaagcaacaaatgaaataagcgctaaaagacactcgctaaaagacactcgctaagagtgtctttctttttgttagttatagtttttaaaacttttaaaaattctgtatttttggtaaactgaaaacatcgctcattttaagggaggaggaaaaaaatgaaagtgtttatgaatttagcgtggttttttaaacaagaaaaacgagcgtacataactggaattattttattgtttggcgttgcacttttagaacttgtagcaccaaaagtaattggaatcgttgtagatgaaattaatgatggaacattgacgaccgataagttactaaaatgggttgtactattagtaattgtaggcattacgatgtacatattacgttacatatggcgtattatgattttcgggtcttcattaaaattagctcgccaattacgaaaaaatttatatgaacattttacaaagatgagtccatctttctatcagtcaaatcgaacaggtgatttaatggcacatgcgaccaatgatattcaagcgatccagcaaactgctggagcaggtgttttgacgcttgttgactcattagctgtcggaggatgtgtactcgtagcgatgggttttacaattagctggaagttaacattattaagtttaattccaatgccgattgtagctatttcgacaaattattatggaactttattacataaaaggtttcataaagcacagcaatcgttttcggaaatcaatgataaagtgcaagagagtatgagtggaatgaaagtgattcgctcgcttggacaagagaaagaagatttgcaggcgtttcgaagaaaatcagaagatgttgtaaataaaaatgtgttagttgcacgtattgattcgttatttgatccgacaatctctcttatcgttggattttcttttttaatcgcagtatgttatggatcggtattagttgtaagaggtgaattaacagtaggtgatctcgttacatttacgacatatttaggtaccctcgtttggccaatgttagcgtttggatggttattcaatattatggagcgtgggcgtgcttcatatgaccgtgtagaaaaaattctttcacaaaaatcagatgtagtaaatagcgaaaaagctgtacagacaatagcgagcggtaatgtttcgtttgccgttgattcattttcgtataagaaaaatgaattgttacatttaaacgatattcactttgatttgaagaagggcgaaacgctaggagttgtaggacgtacaggcgcagggaaaacaactttattaaaatgtttaatccgtgagtatgatcattttaatggtgaattaaaaattggggagcgagatattcgagatataacacttcatggtgtccgttctgccatttcatacgtgccgcaagatcattttttattctcagcaagtattggtgagaatattgcctttggaaaggcggatgctacatataatgaaattacccaagctgcagagattgcttgtattcataatgacatcctccaattttcagaaggatatgaaacagtagtaggggaaagaggtgtttcgttatctggtggccaaaaacagcgaatctctattgctcgtgctttattaacaaatgctgaaattttaattttggatgattgtttatcagcagtagatgcaaaaacagaagagacgattttaagtgccttaaagagggaaagagcagggaaaacgacgattattactgcacaccgattaagtgcaattcagcatgccaatcttattcttgttgttgatgaaggtagaattgtacaaagaggtacacatgaggaattaatgaaggaaaacggctggtataaggaaatgtatgaaagccagcaattagaagctttagtcgagaaaggaggcgtatgatggtagagaagaagcgaagtgatttaagtagattgctttcctatatgaagccatataaagggttgctatctttagcatttatctttttagttggtgcgacagtaacggaaatgatgggtccttttttaattaaacaattcctcgatgaacacctagtaccgcgggattttgaacgatcagcgctcgttactttatttgtaatttacatagttgctcatttattaaaagtattatttacgtatttaaatctattgtactttcagaacattgcttttaagattgttcaagatatgcgagttgaagtatatgaacatgttcaaaagctgtcattaagtttctttgatcgtacgccgattggtacacttgtatcgcgtataacaaatgatacggaagcgattaaagatttttatgttagtgtattatcaacatttgtgaaaaatgtagtctttttagtaggtattttagtagcgatgtttttattagatgtaaaattagcgctattttctctcgtattaattccgataatgtttgcgattatggtattatatcgccggaaaagtgcagctttttatttagaagtacgtaatcaactaagcgtgttaaatgcaaagttgaacgagtccatacaaggaatgaatattgttcaagtgttcagacaagaaaaacgtatgagaaaagagtttgaagaagtgaataataaacattatagtgcagggcgacgtactttgaagttagacgcattacttttacgaccagctacggatttagtgcatattgtagctattgcgttagtactaggtttatttgggattgatgctttaaagagccctgttgaagtaggagttttatatgcttttgttaactatatacatcgtttcttccaacctgtaaatgagatgatgatgaaattgtcctttttccaacaggcacttgtttcgtcatcacgtgtatttcatttaatggacgagaaagatttagcaccggttcaaaaaggcaatgagaatcctcaagttgtggatggggatattgaatttaaaaatgttactttttcatatgatggaaagcgtgacgttttaaaaaatgtatcatttcacgtgaaacaagggcaaacggttgcttttgttgggcatactggtagcggaaaaagtacgattatgaatttgttaatgcgattttataatattaagtcaggaaatattgtaatagacggtgtagatttagaaaaatttgaagaacgagaaattagaaagaaaataggactcgtattgcaagatgcatttttatttgctggaaatgtaaagcaaaatattcgtatgtataatgaagaaattacggatgaagaagtaaaagaagctgctcgatttgtgcaagcaaatacgtttattgaaaagttaccaaaacagtatgaaacagaagtagtagaaagaggtgcagcattttcaagcggtcaacgacaattaattgcttttgctagaacgatagcaacgaatccgaaagtattagtattagatgaagcaacagctaatatcgatacagaaacagaagaggctattcaaacagcgttgcaacaaatgcgaaaaggtagaacgacgatagccattgcgcataggttatctacaattcaagattcagatcaaatttttgtgatgcatgatggagagatagtagaaagaggaacacatcaagaattactaagtgagcaaggtttgtattataatatgtacttgctacaaaataaagtgagtttgcaaaaggccttgtaatacaaggtcttttttattttgtatacaacatatgtttactctttgtttctatagcataaatgttgtgtcctcttatgaaacttgtacatattgtatgtatacgaagtaaaaaaattgataggagattttatatgcaaaacagatcaagttcaaatgttacgtttattgatgtgtctcattgggaagggaatattgattggaatgcagtgaaggcatctggaattccagcagcgtatgcaaaagcgacagaaggtgtaaactacattgatcctacttttactaagaatgtacaagcagcacgaaatgcgaatgtattaattggtgcataccattttgcacgcccagaacaaaatgatgcaatttcagaggcaaaatattttgtgggtatattacaaaataaccagacagacttaatgccagttctggatttagaatcaccaacagatccgagcaacagtaatttaactggtaacgctatatcgaattgggcaagaagcttcataaattatgtgaaacaggctactggaaaagatgtaatgttatatacaggagtttggtatattaatgagttcggaattagcggattaagtgatataccgctttggattgctaaatactcgagtacaccgcctgctgatgctggtggatggacagcgtggacagcgtggcagtacacagattctggacaaatttcaggcgtaggaaattgtgatgtatcagctgcagtttcattagaagctttaaaagggaatggagcaagtggtggaggtaatgtttccccgcctaataatgcaactccagtgtacggggttgctataattaatggagataatgtgaatttgagaagtggaccatctttacagtctagtgtaattcgccaattgaatcgtggcgaaacatatgaagtttggggagaacaagatggatggctttgtttagggacaaatcagtgggtatataatgatccgagttatattcagtataaacattatgtagcgactattactggtgataatgtaaatttgcgtgatgctccatcattaaatggaaatgttataagacagttacatcagggtgaatcgtatcgagtgtggagtaagcaagatggatggctttgcttagggacaaatcaatggatatactacgatccgagttatattcagtatggtgtacaatagagtgaaaataaaaggtgccccgtcagaggtgccttttattaaaaatatacaacttttacaaagtctatatcgaaaccatagtatactatagtagatatatttataaaaaataatcgaaaatgaaataaaggagtaaaaatatgaattatgtgctaataggtgcgattttaatattattagctgtagcatttgtgctgttttataaaaataaacagttagaatcagagagtcagcaagtagaatttgaaaagaaacaagcgattgaaacgtataaaaatgaaattgcagctacagtgatagagcataaagaacaacaaaataatttaaaaaatatggaacagaaaaaatacaatgatttacaagtaagtgcaaatagagaaattgaaaatatgcgtatgatgaaaaatcaattagctatgcagcatagtaaagaacgtagtgaaatacaaaataaacataataacgaaatacatatgtttcaaaaattaattgcaaatttacgagaatatactaaaaacggtgctgaaatgaatacgtacgaaacattacattatatgaagcgaggattcatagagcaaggcatcatattagatgctgaaattcaaatcatgccgaatgtttttattaaaaataatagtgaaataaacgataatcgaatccatcatctcatcttgtgcaaaactggtatttatctacttgagacgaaagaatgggaagagaaattaattcatggtttaacgaaagaaaatgctggtatatattcatttatgattgatgaaatgggtaagtatcaacaagaagttgaaaaagaagagacatttgaatatatagtaggtaaagattcgtcaactatacaagtgaaaaatgaagggaatccagtatataaggtgaagaaactatctcaaattttatacaattgtttgaaagaaatgcaggctaatagtataaaagaaaaggtaaaaccagttgtatatttttataatgaaaatggaaaagaaataatagatctttctagtgaggaaacacctagattaaaaaatcgggagcaaattgtaacgttcttcagaaatgaaatcttagcagggaaagtagtatatacagtgcaagaattagaacagattcgagaaatgattagccggatgaattatatagtgagttaaaaggggagatctttctgaacgctatgctacgtggcattttgtatgtctatttttgtttgtatatagtaatgtacattctatttatattcgtcattgatatggtccatatacccttaagtgtaaggagcatttttgtagtattcataccatttgttttattagtcatgatttaaagggctattttatatgtttctaaaaatcgtaatgaagaaaagaagcaaatgttgggggttttaatagtagcactcataccattaatagtgtgcactgtacaactaagtgtaaatgaatatacatcaaagtttaatcaaaatagatggttaaatcatgcagataagcgggtatatatggtagatgatctattacaaaaatataaattaatagggaaatcaaatgaagaaattatacaattgttaggagctccaacggaaacgagaagtggggaagaaggagttaccactttgtattatcttgggactgaacgtggctttattccaatagatagcgaacagcttgttttccaatttgatagagatggaaaagtcatggaatatacggtgcataaagattaaagaaacgtagagggaagctatatgttatagcttcttttttatttttcaatatgtcacggaagggggagaaggtttttgagtggaataaggaatgaaagcggaggtgatgcatatatatagatgcattgggtgattattagtccgattggtgaggggtaataattaataagtacggacaaaaaccccactcattaaagttttactttatcatattgtataaatgaaaaggaggtaagacggtgaaagcaatcccgactgatgtcctgagtaaagaattgatggaaagagaaggagttatatctattacagtaaaggaatttgaaaaaatagaagtagctggagtagtggtcgctggtccagcggttattttgattaatcaagattaagtacatatttttgaaataaaaagcatccgtctaggatgctttttatttgtatgtaaggataaatatgatggataattgtgttactggagggaaagtctgtggcaattattataacaatgttagtaatgggtattttattaggatttgttggagctggaggagctgggtttattatcgcgatactcactttagtatttcatattcctattcatgttgctcttgcaacatctttaactgcaatggcatttacgacattatcaggtgttgtcagtcattaccgtgaaggcaatgttgcatttattataggcgggattgttggaggatttggcgcaattggctcttatattggttctaaatttggttcacttataccagcacatcttcttcattggtttacagctgggatgttatttttatcggcaatttttatgtttattaaattaattatgttccaaaacaaagaacagtcatctttatataagcataaagagttttccatgaactacttgttgaaatgtatatgccttggattagttactggaatgatggctggttcatttgggattggttctgcaccgtttattcagcttggattaatggttctattgagactaacgattcagcaatctgtagggacaacgatgcttgttatattaccgattgcaattgggggtgggctaggatatagttcggaaggatatttagattatatattgttattgcaagtattaatcgggaccatgttaggggcatatattggcgcgaagtttacaaattatgcaccgcgaatgcttttgaggttttcgatgattatgacaccggttttagctggatgtatgctattgatggaataaggtgaaattataataagtagggggttactgcttacaaatagcgggataaaattaatatagcaaactattaatatattttacgaatgaattatgtaggtaattcatatttcccatataaaaggatttgttttaatattatgagtgtaaagttcgagtattcgaagtactacttgaattatatccctatcccttttctaaaaatgcgaacaagttttgccctattctattcaatagttaattgtatagaaatatattgttcgatgaccattatggaacgtacataatgggaaaatcccgatccttaaagaggatgcccctaatcttcatgtgaaaatatgatcggataagaaagctgaccaattgatggtcagctttctttttgttcaaaaacaattttttctttaatttctgtttgtaataatacagtttttccgaagcgacgtttgcattccgcacgcactttttcaatggctagtagctgagtagtggcgggaactgtgacaatagcttggcgaggctttcgattttcttcacaaaagacacattccacaacataattagaaatcatattttcatccttccagttttaatttctaagaagggattgcctatgaagttgatgtaatctttcgtcattgttttatttttttcctctttttttcaaggggaaaataaaaaagagggcgaattttagtaggggagggatgtttatggagagatggataggtagtgcagcggtatgtgtaaatgaaagaaaggaagttttaatggtactgcagggcaaagagggagaagaaaaaaggtggtctgtcccaagtggaggacttgaaaagggagagacactagaagaatgttgtattagggaagtttgggaagaaacaggttacaatgtggaagttgtaaataaaatatatgaaaaagagggtattacatacggtgttccagtgtatgtccattattattttgttaaacaaataggcggtaatatgaaaatccaagatcctgatgagttaatacatgaaattgcttggaaagggatacatgaagttgaacaattgtgtttagcttttccagaggattatgaattgctgtgccaatatatagataaagaagcaagtatgtaaatacttgcttctttaatgtatccaagacaagaaaagcggaacgataactaaactagcgcctgctgttaaaagcatagataaacttgcaattgttccttccacaggaccgatttcgaatgcttttgatgtaccggttccatttgcgcttgttcctaacataataccttttgcgattgctgttttaatacggcaaatacgtatgagagaaggaccgagcaatgctcctgttaaggcagttaaaacgacaaatacagcagttaattgtgacatgccaccaatcatttctgaaatagccattgcgattggtgttgttacgatatgtggcgctaaactatgttctagtgatgaatcaatttgaaaataatttgctagtagtgctgaagtaatgactgataaaaacgaaccgacaatgacattaagtaagatagccattccatgtttctttaataaatcaaagtatttatagattggccatgcaaaagcaactgttgcgggttttaataattcagttaaccaatgaccaccagattcatatgtttcataaggtgtatctaatccgagcaataaagcaattaaaataatgggacagacgagaagaggagaaagtagactccaattccagcgttgatacattttttttgatagccaatatgtgaatagtgttaatagtaaacaaagaaatccgatcattgcgttgatcctttccgctttagtagcaattctgttaaaagtcctgtaactaaggtaacgcaaagagtgctaatcataataattaaaatgagatcgattccatattgtgttagtgtatctctgtaacgtatgacagcgactgcagaagggatgaaaaataaaataagttcttttaataaaaaatctgctccgtcctgtatccattcttttttaactaggttaaattttaatgaaattaataataagaaaataccgattatacttcctggaactgggaggtgtgcctgttttgcgatccattcacctgtccaagcgaaacaaaatagtaataaaatttgtccgcttaacttccaccatttcatacagtaaccacctctttcttttgttacataaaaattgtaaaaaagaattaacaatttctactatacgttcattcaaaatatttgtctaatatataaattatatgttattaatatataagacatattaatcgaaagtgaaaagggtgtccaaaaatggaattacggcatttgcaatattttgttgttgtggcagaagagttacactttggacgggcggctgctcgtttacaaatgacacaaccaccacttagtcaacaaatacagcaattagaaaaagaaatgggagttacattattttcaagaacgaaaagaaaggttgaactaacagaagcaggagaaatgtttttaaaagaagtaaaaaaagcgtttgaacaaattgaaaaagcagtagaagttgcacaaagtgcgcaaaggggagaagtaggatcactttcaattggttttgtaggtgcggcgatatatgatattttaccatcaattgttagggaatatagaaagaaatttccgagagtgtctgttgcattacatgaattgtcaacaccagatcaagttcatgcacttcatgataaccgtatcgatattggctttttacgtccaccaattccaacgcaattattagaattagagccaattcaaaggttatcttgcactttgtgtttaccaaaggcacatccacttgcagagaaagatgaaatacatatagaagatttacgagatgagccgtttgtatttattacgagaccagtatggccagctttgtatgatacaattttatctctttgtagagaagttggatttagtccacgtattgtacaagaagcaacagagtatcaaacagttatggggcttgtagcagcagggattggaattacagtaatacccgtgtcggcaaataagttatataaaacagaagttgtatataaagagttatatgattctaatttcgttgcagaaatgtcagtggcttacaaaaaaatgaatagtaatccagagctgctagagtttttaaaaattgcaagagagaagaaaagaatagaagtagaagatgagtaatagtagtaacagaaaatggatttgattcaaatccataaaagtacaccttattaaacaataaagcggaaatgcaacttaagttgcatttccgctttattgttctttttttagctcgatactaaatagataaacgtgttcattttcttttaagagtaaatcaatacccttttcttcgtcaattgtagggacgcttacagtttctttactggtttggattacagcagctaaagttgttttttgattgtattttaaattttttatagattggattgtagtagttgcagagctatttacgcttggtggcgcttcttcaggaacaagtgttgaaccaccttcaatattcagataccactgccttttttcttgtatatctttatcaaattggaaatgtggtggtaaaaaagaaagctttactttcttttttgaaaaatgtgaggtagctatattagcaatttcttttgttttcttaccattgttataataatcaattgtagcatttatttcatctttatcatttttaagcgtaacgttataaaatatgctatttccttcttgaaaaggagtcatttgtaaaatagaagcttgctcttttgttaatttgtatggctcaacaatggcaacttcattgttttttatttggctacaacttgtgagtaataataaacacaagattgatagtaattttatacgcatgcaacctcctcctttttacaattatattctaaatgtgattttttatcattgcgttttctaggactaaagacttagaagaaattccgattgtagtgcgatgtttaaaatgtcatatttttatacactagtagtatagaatgcgtatgtaataaggtaggggaagaattttatgtctttatgtcggttagcgagaaaaaatattataacatttgctaccaaaaggatgaagcaatttatgtggattgctatgagtactatgattttgttttttatgatatcgttacaatttaatgaaggagctattttgaaagtagggaatgcatttgtatttcaaatgtacttttacacactttttattgtactaattttcatatgtatttttactacatataaaatgatgtactcccttttgcatgtgaggagggaggagtttatatcttatgtagaagaaaatatgaaaagaaaagaggtactatgtgtattatgtcaggagcaattattcatttatggagcagcatttgtttttggattaattaatgggatgctatttttgaaattattcacggttatctttatgaaaatcgcagggatacaaggaataaatagtgcgccaattacaatatatgcagttgtaattattagtgtaattatgatgactgtcgttttaatatcgatgatgcaatgttatcgatttgttcgaaatttaaaaggtgaaaattcgttgcggtttaaagaaagggcatgagaaatcatgcttttttctattttacacataaaaataatcatgttacagtgaaaagacctgacaaagaatgggaaggaaaggttgtatagaatgacaaatgaacaatcaattgtaaaagtcgatcggttaacgaagcgaatcggatcaaagacacttgtacaaaatattagttttgaagtgaaaaaaggcgaggttgtcggtttactcggaccaaacggtgctggaaaaacgactttaatgagaatgatggttggtatgatccgtatgacagaaggtgaagtatggattgatggtcaatctgtgaaacagcaattcgaaaaaacagctgcgaaaattggagcggtaattgagacacctgaattttatccttttttgagcggctatgaaaatttaacatatttcggacgaatgaatggtaatgtgaccgaagaacgtatcgatgaagtagtgaaattgttagggatgggacaagtaattgatcgcaaagtaaaagcgtattcactcggcatgagacaacgtttaggaatcgctcaggcacttattcacgatccagacgtgttgatactagatgaaccgacaaatggattagaccctagtggaatacatgaaatgagaatgtacataaaaaaattgcacatgaacaaggaaaagctgtacttgtatcaagtcacttactttcagaagttgaattaatgtgtgacagagttatcattattcagcacggggaatatgtggctacgcaaaatattcagcatagccaaagcgaagagatggagacgatccgtatacgtgtagatgatgcgaataaagcagcagaaatattagggcatgatgttttagtaaaagataatgaattacttattaatgtaaaagatgaagaaatcccaaatgttattcgtacattgcttgagaaaaatattcaagtgtatcgtgtatatgaagaaagaaaaacgttagaagagcaatttttagaattaacagggggaaaagatattgtttaatttagtatataacgaactgtataaaatatttaagcggaagcgatcgattattccatttgcagttattgcagtattaataatcggattaggatgggttacggtaaagtattttgaaccggaaacaaaaggatggaaagtagattatacagaacgaactgtagaaattgagaaaaagcttggcatgaaaaaagaagctattttagcagaaaaatcaggggatgagcttgtaaaagaataccagcttaagatgaagcatttagatacggatacagcaccggcaagcagttctccactttctttcatgagagatacaggttttatcgtatttccaattttgctcccatttatcctcgtgtatgcaagtacaatttttgcgaatgaatatagctggggaacatataaatttttaacgatacgaccagcgagtcgctttaaaattttaacagcaaaatttttagcaattgttatatttgcagctttattatttatatttaatatgatcttctccgctttatgtggacttgttatttataaattccaacagcctgcatggagtgagtttattttccaagatggaaatataataaaacaaaacatttttgtagaagcaagtaaatattatgttttatcgtggttaccaacggttgtgtacgcatcgtttgcatttatgatttctgtgttaacaagatctagtggaggtgcaattggtatttcactattccttgctttatcaggcaatattgcgctattagcagccactagatataactgggcgaaatatttattgccagcaaacacagatttatatagtatttcaaagaatggaagttttattgatggagtaacattcccgtttgcatcatgtatgttgttactttatttgttcgtatttttatgtatttcatatactgtgtttttaaaacgtgatttaacttaataagaaaagccgttcagggtgtgaagtgacccccgaaagttagacaggtcgtttcattaggcagcctctagggtatgaaaatgtacatatttattcaagcgttaatgtacatatttaagttagcatttatatgcgatatggagtttggaaaaagaagaagcttttttaagaaaaatgcatcaaaaaggatgggctttacaaaagtataatgtaatgtatacgtttaagaaaactgaaccaaaagatgtagtatataaagcggattttagactggattataaagattcaaaagaaaaacaaaaagaatatattgaaatatatgaaatgtgtggatggaaacatgtaacgagttttgcgaagtggaattatttttgtaaagaagtagacgtggaaaatgagttacctgatatttattcagacaaagaaacgaagatacaaaaatttgttgaattgatacagttcgttgcaattatgtttgtaatgttaattccagtgctttacttatgttttcttggagtatcagaatcaggattatataaaggtatggttgggtttttagtttgtatatatttatatgcgtttattaatttatttaggaagattaaaaagttgaaaaaggaaatattttaacaaagagtgatattcttagagaagattattgatgggaatcaacttctctaatttctatatatatttattttgttcattcttttttatataataaaagaccaactttttaattcatagaactaacagttacaaagataatataccataataccagtaacaacacctaaaaaaatcataaatgaagaagaaataatcaataataacgaactagcaattaatattaatttaatagatttttaatttttaaaatggtagtaaagtaaaagactataaatagtagaaacaaaccatattgttagaccgtaaggagtcgttattttctcccaatcgaagatccaaaagtaaaagatgactatatgacaagttaatagtagaaatattgatggaagcgttatttttttattatttgttttacctcgcttatgtaaacattcccaaaagagtgcgaagtttaacatataataaggaagaaatccatttttaattaacttattaaacgaaaaaatcccttatagaaaaatctatttctataagggataatcatgtttttattagaaagactgattttgagcaggtttaataaattgttctgggttttcaacaagcccacatacagcgcattggacgcgataagtaggtccttgataggccatatgaaaagcattcatcgtttcatttgtgtattcttcttctacttgaccagtttgtggatttaatttgactggttttacttgttgctcaagaatattaaagcgggtacggtttgttttacaacttggacatagcattggttccatatgtatacacctccatttgtatcatttcttaaaatctttaattttatgcaagcaaaaaactttctcaatataaataggtgtttaatgtatttaaaattcagaaaaaataaaatataataaaagtacgaactggttatgtccaaaccaaatctcctgttttatgccaataagctggggggccgagaaatcggcctcatttttttgtgctcgttactataagaaacaaggtttttatgagacatttgtcgaaattttagggatggatataaagggggatgtaaaatgaatttaaaaatgaagtacatcattttatatgtagaaaagtttgaggcatgtttaaggttctataaagatattttacagttacctataaaagcagagcacggaacatatattgaatttaatactggaactaccattttagcgatgaatacgcggcaagatgtgaaagaattaacaggactaccgcttacagaaggtgaattacagtcttctcatttcgaattaggattcgttgttgagaatgtacaagaaacgattgagcaatttagagagcaaggtattaaaattttagtggagccaattgtgaaaccgtggggacaaacaattgcctacattgccgatccagatgggaattatattgaaatttgcagttcattagaataaaaggagaaaaagagatggggtttccgagactagaaacagaacgtttacaattaagagaactaacactgttagatgcagaaacaatgttccgttatttttcaaaagaatctgttatacgttatttcggaatggattctttcgaaaatatcgagcaagcgaaaacaacgattcaaacgtttaaaaatcgttatgaagagggcagtgtatttcgctggggaatcgagaaaaaagggacgggccaattaatcggaacgtgcggatttcatttaattaataatcatcataaacgagctgaaattggttatgaattagacgatacatattggggacaaggatatgcatcggaagcgttacaggcaattttaacttacgggtttgaaacattgcaacttattagagttgctgctgttgtatatgtagaaaataaagcttctcaaaaattattaagtaaagcaggatttcaagaagaaggattacttcgaaaacatatgattcaaaatggagttgctcatgatactattttatattctttattaaaagaagagtggaagaagtaatgagtacaaacgaacttataacgattatgaagaagcatagggaaaatagattcattttaggtatagatggtttaagtcgatctggaaaaacaacatttgtagccaatttaaaagaaaatatgaaacaagaaggcattccgtttcatattttccatattgatgatcatatagtggagcgtaataaacgatatcatactggatatgaagaatggtacgagtattattatttacaatgggacattgaatggttaaggcagaaattttttcaaaagctacaacatgaaacaaaattgaaattacctttctttcacgaagaaacagatatatgtgaaatggaaaaagtacagattcctattgtaggcgtaattgttattgaaggagtttttctgcagcgaaaagaatggagagatttctttcattatatggtctatttggactgtccaagagagacaaggtttctacgtgagagtgaggagacacagaagaacctttcaaagtttgaaaataggtattggaaagcagaggattattacttagaaacggaattgccgagggatagggcggatttagtcatccaatgatttgaaaatagaaggtgaatagaatgaatattttatgggattttgatgggacgttatttgatacgtatcctgcatatacaataatgctttctgaaatattaggtgactcagtagaaaaacaagaaatatacaaaaacttaaaaatatcatactctcatgcaattcagtattataatatttcatgcgagcaggaagaaaagattaaagttttgaagggaaaattcacgccaaaagatatgaaaccttttgcaggtgtcgaagaggttttgaaatttgcagataaaaatgtgattatgacccataaacatagggcaggagttatggacattttaaaatattacggctgggaaaaatactttgtagatatggttacaattgacgatggctttccccgaaagcccaactctttagcttataatcatttacataaaaagcataatattgatttagctattggagatagagaattagatttattacctgcaaaagaattaggtatttcaacatgtatgtttcaaggtaattgtgatgtagcggattattctttatcacattactcggagttttttaagatagtgagtgatagagagttttctttataaaaaaagttattaataaagactgaatcttttattttaaaggtacagtctttattttttagaactctttcattttattccgtaataacgggcagcctgattgcttcaactaataatcagtggagggtgaacaaaacctccactgattaaagtttcactttattttctgtatataataattactagagattaaaggataatcgtccatctttattaaggaagtggccagtttattttaactaaattatggttattcatgttaatatgcactcatagctatatagaaggggtggggttagtatgaaaactgaaatagttcctaaaaagaagtacagtataataagctatgtatctttactcatcggcattctgtgttttctattcgtttttataacgccaacaaggatagccaatgcaggtaatatagttggggattatattacaattgcccttacaggtgtaggtatcatgctttcaataatcacaatgacgaaaagaacagagaagaagggaattgctattctttcattaatactgtcctcatcattttttatattttggatcatagcaattatcctattgtttactggccaaattagttttgcgccgtaatgtgtaataaaaagagtccttctcgtatgaaggactctttttactcggtatcttcaggttgatattctaaaatatcccccggttggcattctaatgctttacatattgcttctaaagttgaaaaacggactgcttttgcttttccatttttcaagatagaaaggttagccattgtaattccaaccttctccgaaagttctgttacactcatttttctttttgctaacattacatcaatattaataataattgccatattattcacctcagaccgttaaatcattttctgattttatatctatagcatcttttaatagtctttggagaacggcagcaaagaccgcgattaccattgaagcaaaaatcataatcatcccgataataataatgccaggggcgtcatctctctctgccacgagatagaaaagtagcatacctaatacatataatacactaattgccaatgcgctgtacttaatattttttaaagcttgaacagatagctctgagaatgcgttatttttatcaatatagtttaaaagcttaaatgtttggtacagtgcgaagtaataaggtattgctgttgcgtataaattgataaatacaagatatttaatatatgcaatatctggatataattctgcggcgaaatttcctattttagggactaaaaaaatgcacatagcaagaacggggattccgatcagaattacaacggtctttaaaaagagtgtggatccttgtttcataaaaagcacctcatttatttaatatcttattaatttaacatgaaatttattgtttaacaataaatttttatttcttttaatcgaggatttattgttaaacaagtaattaatgaaaaggatgttaaatcttttttataagataaatgatacatatcgatatttaattaaagaaagagaaagtaactattgttagctttatgagaattgggaactaataaaacatatgtaggttttggtatggaaaaggaaataaggtgtattgaaatgaatgcaaagtttatggaggaacaatcatgttgaattatggtgtgaagatgaaaaagttactattagtgggagctataatagtaagcgtattaagtacggaaagtatgatgaattatcattcggccaaagctaaggtgaaaaaagtagaacaccagcctaaaaatataattatgatggttatggacggaacgagttcaacggcgacaacattggctcgctggtataaaggggcaccgcttacgttagatcaaattgtaacaggaggtgttcgtacgttttcggcggaatcagctattacagactcggcgccagcagcaacagctttagcaactggaaataaatcgaattcaggatatgtaggtgtattaccttctattgtaagttcgcctagcttacagccaataaaagaagaagacaagttacggccggtcgcaaacgtattagaaggcgcaaaacgtactggtcgtgcaactggcattgttgctacatctgaaattcagcatgctactccggccggattctccgctcaccatgtcaatcgcaaacattttgacgtaattgcgaagcaacaagtgtatcaaaatatagatgttgtattaggtgggggaaaagcggcactgctacctataaaaagtaatgggatccgaaaagatggtgaagatttagtaaaggtgattcaaaacaaaggatacgactttgttgaaacgaaagatgcgttattgaactccaaatctaataaaatttggggctctttctcacatcatgctcttgcgtttgatatggatcgtatagcaacaaatccagaacaaccaacactttctcaaatgacagaaaaagcaattcaaacattatcaaaagataaagatggcttctttttattcgtagaaggtagtaagcctgattgggcagctcatgctaatgatccaattgggatgattagtgatgtattggcatttgatgaagcggtagcaaaggcgttacaatttgcgaagaaagatggggatacgatgctcatcgctttaactgatcatggtaacagcggcatctctatagggaataggaatacgaaaaaaggatacaatactacaccggtttctgcatacattgatccattgaaaaaggcgaaaatgacacttgaaggaactataaataaactgaaatctgatttatcaaatgtagaagatgtagctaaactatacggtttggataatctaactcatgatgaaaaagaaaaattaaaagtggcaaaaaagaaaatggatgtaggacgaattcttactacattattggctaatcgtgcaaatatcggctttacgacaggaggacatacaggtgaggatgtattcttacattcttatggacctcaaaaaccagaaggcttaatccaaaatacagacattgcgaagacgatggcgaaagcgatgggctttaacttagaagaagtaacgaataaaatatttttagagagtgaacaagcctttaagaaaatcggtgcaactgtaacagccaacaaaaccgaaggagcaaacccgttactcgtagtaaaacataataaagtagaagcacaattatttggtaacaaaaatataattcgtatcaatggtaaagggtatgaattaagaagtattattgtagagagtaatggaaagtgctatgtaccagaagaagcaattcaactatttgtaaagcattctcgttaaaaaattgccaaccagttaagctaactggtggcaattttttgtgtttattctaaatataagtgttcgaattgttttgtaaagttttccatatgagacttgtataaatgttaaagggaaattatatttttttcttacattaaaaaatttcgttttgtagaataagaagttatacatatagtaaagtctaatgtgttatcaattaatatttacgaaaaatatattaatactttagaatttctttaatgttcattattttttatttaaggttatccgttatatttataatatgtttatttcaatttattgtattgaagctcagttttatataattataaagcaatcatcaaaataaaatctccactagagtaaatttattatttttttgcggaaattattatgcagctaagaaaactgtaatttattgaattagaaatatattagaatttagttgaagaaagagagagggaataaaatgaatatagtgcacttacgtcctaaacagcggtctaagtatcgcattatgctagggaagtggtattactctacaaagaggtacattcagtggttagcagacggaaaaacatatgcaaaaaggtttcaacaagaaaagctaccttgtacagcaattcagcaccgaacgatattacttcgtaagctcaaagatgtagatatgtggtatcaacagaataaggttgttaatttgaaaattgctgttaaaaaactaaatggtatcgtcattagaccgggagaaacattttcttactggcgtttaataggtaagccaacgaggaaaaaagggtatgtagaaggtatggtattacattacggatcttttcaaacaggtattggaggaggtctttgtcagctttcgaatttaatatattggatgactttacatacaccactgacagtaacagaacgatatcgtcatagctttgatgtctttcctgactctaggcgcactcaaccgtttgggagtggggcgacttgttcctataactatttggatttacaaattaaaaatgaaacggaccaaccgtatcaacttcacctttatatgacagatgaacatttagttggtgaatggagaacagtctatccgcaactttatcaatatgaagtgtatgagaaagaacactcaattcaacctgcatactggggcggttatatacgacataatgtgattcaacgtaaagtatataatcaacagaaacagttaatagaagatcaatatgtaacagagaatcacgctataatgatgtacgaaccactattagcttgtaataatgagaatagtgagtaatatggtaatccatagattaaatagtatagaaaatatttaattcttatttttattaaaaaagcatgaatcccagatttactgggttttgattgtaactaagaacatataaaagttcactgttatttataggagagtctgtttgtttttatatcttatgtatttcaccctgcataaaaaaatatttctcaacattttatttgttgaaaaatattgaatattcgtattataacgaatattatgttgttatcggcaaaaaacgataatttgcagacactggggaggaaatacattgaaaaagaaaaagaaattaaaaccattagcggtattaacaacagcagcagtactaagtagtacgtttgcttttggaggtcacgcagcgtatgctgagacaccaacatcatctctaccaatagatgagcacttaataccggaggagcgtttggctgaagcgctaaaacaacggggggtaattgatcaatctgcatcacaagctgagacttcaaaggctgtcgaaaaatatgttgagaaaaagaaaggggaaaaccctgggaaagaaatcttaacaggagatagtcttacgcaagaagcctctgactttatgaaaaaagtaaaagatgcaaaaatgagggaaaatgaacaggcgcagcagcctgaagtaggcccagtagctggacaaggtgcagcattgaaccctgggaaattaaatggaaaagtacctactacatcagcgaagcaagaagaatacaatggagctgttcgaaaagataaagtacttgttttacttgtagaatttagcgattttaaacataacaatattgatcaagagccaggatacatgtattctaaggactttaatcgtgaacattatcaaaaaatgttatttggtgatgaaccatttactttatttgatggatcgaagattaacacatttaagcaatattatgaagaacaatctggtggtagctatacagttgatgggactgtaacagaatggcttactgttccaggaaaagcatcagattatggtgctgatgcgggtactggtcatgataacaagggacctttaggaccaaaagatcttgtgaaagaagcattaaaagcagcggtagcaaaagggataaatttagcagactttgatcaatatgatcagtacgatcaaaatggtaatggaaataaaaacgagccagacggcattattgatcatttaatggttgtacatgctggtgttggtcaagaagctggcggcggtaaattgaaagatgatgcgatttggtcacatcgttcaaaattaggttcaaaaccatatgcaattgatggcacgaaatcttctgtttcgaactggggcggaaagatggctgcatatgattatacaatcgagcctgaagacggagcagttggtgtgtttgcacatgagtatggccatgatttaggcttaccagatgaatatgatacaaagtactcaggacaaggtgaacctgttgagtcatggtctattatgagtggtggtagctgggctggaaaaattgcaggaacagagccaacgagtttctcgccacaaaataaagagtttttccaaaagaatatgaaggggaactgggcgaatattcttgaagtagattatgacaaacttagcaaaggaatcggtgttgcaacatatgtagatcaaagtactacaaaatctaaacgacctggaattgttcgtgttaacttgccggacaaagatataaaaaatatcgaatcagcgtttggtaagaagttctattacagtacaaaaggaaatgacattcatacaacacttgagacaccagtatttgacttaacaaatgcaaaggatgctaagttcgattataaggcattttacgaacttgaagcgaagtatgatttccttgacgtatatgcgattgcagaagatggaacgaagacacgcattgatagaatgggcgaaaaagatataaaaggcggcgcggatacaactgatggtaagtgggttgataaatcatacgatttaagccaattcaaaggaaaaaaagtaaaactgcaatttgagtacttaacagatattgcagtagcttataaaggatttgcgttagataatgcagccttaactgtagatggaaaagttgttttctctgatgatgcagaaggtcagcctgcaatgacgttaaaaggctttactgtgtctaacggatttgaacagaaaaaacataattactatgtagagtggagaaattacgctggttctgacactgcgttacaatatgcacgtggcccagtatttaatacaggaatggttgtatggtatgcggatcaaagctttacagataactgggtaggcgttcatccaggtgaagggttcttaggagtagtagattctcatccagaggcaattgtagggacattaaacggacaacctactgtgaagagcagtacgcgttatcaaattgccgatgcggcattctcatttgatcaaacaccagcatggaaagtaaattcaccaacacgcggtatctttgattataaaggattaccaggagtggcaaaatttgatgattctaagcaatacatcaacagcgttattcctgatgcaggacgtaagttaccgaagctaggactgaagtttgaagtggtaggccaagctgaagacaagtctgcaggtgcagtttggcttcatcgataaaataaggtaaaaagaagagaagctgcgataagtcggtgaaactgactgattgcagcttttttcttcttgtgaaaaaactcgctgttttttatgtacttattggaaaaatatgaagtttctttgatacataaaatgctccgtctgtccaattatagaagctattttggacgtaagaaatttgtaagtaatgagtaagaaaaaagagattttcatagtataaaatatttattatagctacttttaacacctgctactaatagtgtgctataatatgaattagcaacaaaaaggaaaggaattagaacaatgaccttagaaaatactaaaaatttaaaaaaacaagttgctccttttgaaaaatcaatgattaaaaaaagtgtttggcaactgatcaacacaatcgtgccatttattattttatggtaccttgcttataaaagtttgtcagtttcttattggttaacattagttccagcactgttagccgctggatttatgacaaggattttcattatttttcatgattgtacccattattcattctttaaaagtcgacgtgcaaatagaatagttggaacgtgtatgggtgttttaacattattcccatttgatcagtgggggcatgagcattctattcaccacgctacgagtggtaatttggataagaggggtacaggggatatttggacgcttacagtagatgaatatgtagcagcaccatttagactccgtttagcatatcgtttatatcgcaatccattcgttatgtttgggttaggcccgatttatgttttcttgcttaaaaatagatttaaccgaaaaggtgctagaaaaaaagaacgtatgaacacttatttaacgaatattttaatcgttgctattgtaggaatgctttgctgggcaattggatggcaatcgtttcttttagtacatggttctatatttttaatagcaggttcaatagggatttggctgttttacgtacagcacacattcgaggattcttattttgaagaagataaagaatgggaatatgtgaaagcggcagtggaaggaagttctttttataaacttccaaaaattttgcaatttctaacgggtaatattggatttcatcatgttcaccatttaagtccaagagtacctaactataaactagaagaggcacacaacaatacccttcctttaaaaaatgtaccaacaattacgcttgctacaagcttgcgttcactccgtttccgtctttgggatgagaaaagtaacaattttgttagctttaaagatgtcaaaaatataattaaaaataatgtttctgttcgggtgaaatctgaactataattgcatcgtatataaaattccccttaatcattttcgatttaaggggagtttttgtttaaagattagatgccagataagaagaaaaattaaatgtttcaaattgtaatggaagcagattaggaattgctagtacgtaagtacaaatacaagataacaataaatgcattatgttaacaagtggagttatcatgaattttccattacgataactgttcataaatccgacgaaaattaatagcaaaagggggatcgtacaacagtatatctaaaaaattagaaaagacttgaacggaaatttcattcatttttcttggtgttccgcattccatacacttaaataggatgcatattctaattcatctggattgtcatgtaacatagaaatgaattctaatttatttctatcacaatctagaaagtatacacttgcagcgggcatccacctttggacaattggctcttgatttccttttccttgacttcctatcacttctattccacgctcctctaaccacgctttagaagtcattaaaaactctaaatttacaccaaaagcaaaatgtctcagctcaaagtcttcgatattatttacttcccatagtccaagcatttgttttttattttctccgacccaaaagaaagccactcttcttttggagagttttcttgctaaggttaatcctagcttgttttgatagaaatttatcgctttttctaaatttcttacatgtaaatgagtttcgtatatgttctgtatcattatgatcattcctttctttcttgataactaccagttgagtaatgaatgtagttctaataatgtacagctatatctgatatacctatttattattatatcgaaattgaaatacgataaatccaactgaggtagcaagttcaaatgaaaattttactacttttgtaggagaagagaaaaatccattaaattcaggtgaactcatatttaaataataaaaaaagacaacacatgaagtgaaacgccacgtgttgtcttttttgtatcgtacaatattacgaagtttcgctaattttagtttcactttgagtgttagttgcaattcttttcttaactttaaagtgatagtaagtatagcaaaagatgataaatggtacagtacaataaatgcctagtctttgatctgggataaagataagacttactaatataatgccatacaatccaaaaccaagaattggtacaaggggatagagtggagttctgaacttcaagtcgtctaatttcccaccttcagctaaatagtgtttgcggaaaaagaattgagaaacacaaattgacatccaaacaataattgttatgactccagaaatggaaattaaccataagtaaaccgtttcagcagctacgacgcttgttaaaagagaaaaagcagaaatagctattgtcatgattaaagcgttgagaggaatcccacgtgatgataatttctttaaaaatgctggagccatttcgttttttgataaagaccaaagcattcgagtagcagcgtatagtcctgagtttgcaacagaaagaacagcagtaagaataacaaagttcataatatcagctgcatatggaataccgatattatcaaaaacagcaacgaatgggctctttgtgagtcctgcttcttcccaaggaattaaagcaacaagaacaaagattgctaagacgaagaaaaacattgtgcgccatataatatttctaatagaacgaggtaaagtttttgctggatcttcactttcacctgctgcgattccgacaagctctgtaccttggaaggaataattgactgtaaccattgttaatagaatagctgcaagtccattcggaaataaaccaccatgatttacgaaatttgaaaggagtggagctggttcgtcgccttttaaatcaataaagccgaacatagcggcgccaccaagaattataaaagctataatggcagatacttttatacttgaaaaccaaaattctgtttctgcataactacgagcagataatgcgttaatagtaaagattgtaacgccaaatattaaacaccaagcccaaacaggaatatcaggaaaccagcgctgcattgtaataccggcagttgtaaattcaagaccggtcgtattcgcccagcttaaccaatacaaccatccgattgtaaagccagttgcaggattgatgaatttagtggcatattcctggaaagaacccgaaacaggcatggctacagcgagttcaccaagacatagcataacgaaatacattaataatccaccggccataaaggcaagtacggatccaccaggtccagcttgacttattataaagccagatccgttaaataaccccgttccaatcacaccaccgagtgcaatcatgaataagtgtctacttttcatcgtacgttttaattcattgtttgtattgtttacttgcgccattgttttcctcactttcgtagttgatagaataaagtttgatgtttttccgtattatggaatgtattccgtgatgtgaaatcttgttataattttcagataattaaaaagaaaagtcaatatttttttgtttgcgttttcaattcgttgttagtgatatatttttattgttagaaaattgaataaatatattgatttcatttcgaatgtttgctaaattgatagttaattaaacgtactaacatactacgagtaaagttgaggcgagttatggtacagtccattgatcgagcgataagtattattaaattattgaattctacaaatgaaaaagagtattgggctatttctgatatagctgatggaacacatctcccagttagtacagtacatagattacttaactctctaatggagcatgggttagttacacaaataccagagacaaaacagtacaaaattggaccaatgtggatggaaatagggttacgtcaattggagaaggtagactacagatcagttgcaagagaagtgatgaagcggttggcctttgaagtcgaagaaagtgtctatttaaatattccaaacggaacacattctattatcattgaaagaattgatagtcctttaaaaattcgagttatcgataatctaggggaacaaattccactttcaattggtgccgcaaataaaacgatgcttgccaatatgaaaacgaatgaaatggaacatattgtagaacatttactttcttcattaccagaacaaaagcaaattcttcttaatcaaataaagcaaataaaaaatgaaggatatgctgtcagttatggtgaaaaaacagaagggacagcttcagtagctgcacctattatcggatttaatcataaagtagtaggagcattaagtgttgggttaattagtcatcgtattaatgatgatcgactatcttttcttattagcaaggtaaaacaagcagctcatgaaatatcaataaaaatcggcagtacatcagaactataattttgatagctgtcgtcattttttattcatatactggaattcgttttcataatgcggaaaaatagggggatttatatgtcaaggtggcaatcaaaagaacaattgattcaattattaagcagtcttgttgaaattcctagtattacaggtacagaggctgaagtgatattgccagactttgttgtggagcaattatctgatttacagtacttcaaagaaaacccgcaccatgtgcaaaaaaatccgacgggggacggacgatattttgttacagcactagtaaagaaaagtgatagtacaaaaaatactgtaattctagtaagtcactttgatgttgtagatgtacaagattacggagtgtggaaagaagatgcatttaatcctaaaaagttaacatctatgttttattctcataaagatgaacttccagaccatgtacgtgaagatatagaacatggagattggctgtttggtagaggaacaatggacatgaaatgcggcctcgcattacaaatggcaatgattgaacaagcatgtgaaggaagattcgatgggaatgttcttttattggctgtaccagatgaagaagtgaattctgtagggatgagggccgctgttccgagactattagatttagcaagagagcataatttagattataaaacggtcttaaactcagagcctatgttttcaagacatcctggtgaccaaaataagtatatttacactggctctattggtaaagtgttacctggttttctttgctacggaaaagagacacatgtaggtgaaccttttgcagggttaaatgggagttatatggcttcattaataacagcagaactagagttaaacacagacctttgtgatattgtagaaggggaagcgagtcctccaccaactaacttacttcaaagggacttaaaagaggattattctgtacaaattccgcatcgtgcagtcacattatttaatttgtttttattagaaaaatcaatgacagatgtagtttcattgttacgtcaaaaagtaacgaaagtagcagagaaaatagaagagtcgtatgaaaaacatgcatatcgtttttctaaatataatccatttataccacctaatctcaaagtaaatgtattaacttatgaagagcttatcacatatgcaattgagcaacatggacgagaaaaaatagatcatattcaatctaatattataaaaaatagaggagataaagatgatcgtgcggtaacgattgatttagtagataaattagcgattttatgtaaagaaaaggcaccgatgattgtacttttcttcgctccgccgtactatccagctgtgagttcacgcaacaatcctttaataaaagaggtagttgtagaaatggaaaagtatgcacattacaatcataaaattacatttgaaaaccaaaattattttggggggatttcagatttaagctatgtaggcttgcagtatccactggattcaatgagttcgcttgtagacaatatgccattatgggataaaggctattcaattccgcttcaggaattagaagagtttgatgttccagtattaaatatgggaccggtaggaaaagatgcacatcaatggacagaacgtctagatgtaaactacgcatttgaaacactattagatatgttaccgaaatgcattgaaaaattattagtttctaataaaattacacaatcatagtagggaataggtaagggataaaacagaacctttaaagaagagtcgaatcaaattattttaatataattaaaaagtagaacggccaagctcaattttatatgagtttggccgtttatcatgtagtgaatttttaattaaaattatgtgaattcatagctaacgtaatctcttttatagttttattttttagtttgaccagatagttcaacagacttttgcgtacaacgctgcatagctgaaataatcgctgttcgtaatcctttttcctctaatgttgctacagcttctattgtcgttccgccaggagaacaaaccatatctttcaattcacctggatgtattcctgtttctagtaccatttttgcagagcctaacacagcttgagcagcgaatttatatgcttgatttcttggcataccatctagtacagcagcatctgccatcgcttctataatcatatatacataagctggtgaagaaccacttacggatgtgacaacatccattaatttttcacttacgatctctgtttgaccaaaactattgaaaatgtttagtacatcttctaaatctttttctgtcaccatttcattagggcataatgcagacattccttctccaacaagagcaggagtattaggcattactcttacaacctttacttttttattaaaggcattttcagtactttcaatactttttccagcagcgatcgtaacgatgatagcatcgtttttgattacttcttttatttcattaattattgatgaatataggtctggtttgattgataaaattaaaatatcagcatttttagctactttattgttgtcggtagttgtagttagcccatatttttcactagcattttttaaattagcagtgtttaaatctgaacaaataatttgatttgaagatactatatttttgtttatcattccgccaatcatagccattcccatatttccgcaaccgatgaatccaatttgtttatccataataactcaatcttgctccttttataatcaattatatcggtttgatattattttcttagaataagaataacatccctgtgcaatataaagaaacattctaagagaatatattcctttttgcaacactaaaagacaaaaattaattatattcgacattatgtaaatatatacactataatgtaaggttttatgtttatgaatatgagttaaacttatatcattttgtattttcattcagtagggcgataatttcatacaaataacttgtggctctatttatttttaaaaatacctcttgacaccgaatcaaactatatcgcataatataaaaaaattagattgaaaatcgttgaagggaattagtacatatgtcttcttgcgaaagagagtggaattcaccggctgaaagattcctcgtatagaatatatcgaacctatccctgagtcttaaatgaaagtttaggcgttcgcctgcgttataggcaccaagtggatatctatgtatatcaattaaggtggtaccgcggaacaatgaccgtttcgtcctttttattttattaagggcgaagcggtcatttttattttgctcttaaatacttcagtgcagcattgatgagaatagatatagttacaaagtgaatgaagtgtaatttataaaaaaactttgattttagacttgggggataaaaaagtgaaaaaacaacgaattgttgtaaagattgggagtagttccttggcagatagtcatggaggcatctctacagaacagctttcagatcacgttgccgcattggctcggttgaaagaagatgggcacgaggttgtgttaattacatctggagccgtcgctgcaggtttttcagcgctaggatatcctagcagacctgtaacgattaaagggaaacaggctgcagcagctgtcggacaaagtttgttaatgcaggcgtacacggaggaattccgtaaatatggcatcgttactgcgcaacttttgctgacgagaagtgatttttctagaaaagaacaatatagtaatgcttacgctacgttaggagaattattaaaccgttccgctcttccaattattaatgaaaatgattccatctctttagaggagctaacgttcggtgataatgatatgctgtcagctttagtaagcgggcttgtttcggcggatatgcttatgatctttacggatgtgaacgggttatatgacaaaaatcctcagaaaaatgcggatgcaaaaaaatattattttcttcctgaagttacggaagaaatttcttctcttgcaggagatgcaggctcaaaacttgggactggcggtatgaaatcaaaaatcgatgctgcaaagacagcactctctcttggtgtgagtgtatttatcggaacaggacgtggacaggaaaagtttgtagatgttttgaagggtaagggtgatggaacgtatgttggtaatgctcctcaaaaagaaatgaagatgaacaagcaatggattgccttgcattcgcttgttagcggacaaattgaagtagatgctggggcagctactgccatcattcagcatgggaagagtttacttccagctggtgttacgaatgtatcaggatttttccaagtgggtgaagttgtagaggttgtaacgcaacaagggcgcgtaataggaaaaggacaatgcacatatagtgcagaggaactaagagatgtaaaaggtatgcaaagccaagatattcaagtaagaggcgagagacatagttatgaagtcatccatagggatcattgggtttcactttaaaaaggaggaaataaaaatgaatgaagtgttagcaaaggggataaaagcaaaagaggttgctagagaacttgtgcttaaaactacagatcaaaaaaatgaagcacttgctgcaattgctaatcagctgatagtagaaacagcttatattttagaagaaaacaaacgggatattgaagaaggtaaggagaaaggattttctcattcactccttgatcgccttttgctgaatgaacaacgaattgttgatatgacagagggtattaagcagttaattgaattacgtgatcctattggagaatgtgtaagtgcatgggaacgaccaaatggactatctattcaggagatgcgcgtaccacttggtgttgtcggaatgatttatgaggcaagaccgaatgtaactgttgatgctgctacaatttgtttaaaaacaggaaacgcagtaatactacgtggtagttcttctgctatacattctaacaaagctatcgttagcgttattcaccgggcgcttaagcaaactagcttgccttcagaaagtgtacagctcatagaagatacaacgagagatagtgcaaaacagttgtttacattgaacgagtacttggatgttcttataccaagaggcggtaaacaattaattgatacagtagtgagagaagcgtctgttccagtacttgaaacaggtgcgggaaattgtcatatattcattgatgaaacagcagataaacaaatggcgtttaatattattataaacgcaaaaacgcagcgtccatctgtatgtaatgcaattgagacgattgtacttcatgagaattgggcagagcaatatggtagcgagttgttttcttccttgaaggaaagaggagtggagctacgtggtgataataaagcagtggcgattgatccttctatcttacttgcgacagaagaagactgggaaactgagtttttatctctcacactagcagtgaaagtggtttccactgttgaagaagcgattcatcatataaatacgtatggatctatgcattctgaagcgattattactgaaaacgaggaaaacgtcagcaagttttttacttctgtagatgccgcggcactttatcataatgcatcgactcgttttacagatggatccgaatttggattcggagcggaaattggtatcagtacacaaaagttacacgtaagaggaccaatggggcttccagcattaacttctacaaaatatgtgattcgtggaaatgggcaaattcgaaaataataataaaagacactcaatttaatctgtaccctttgtaaaggacattttgaaaaaagttaggcaacatcaagaagaaataccctatagaatagacttttttcaagtgtctattctatagggtacattttaattggcttgggtgtctttttttataaaaattatttaccatacaaatagcccaacgagcatagcacttaataaagaaacagccatcccgctaacaagaagcttccaaacatttttaccgatgactgatgatttttctccgccaaataatgaattgtaagttccgtaaatcatacctactgtactaaagttagcaaaagaagctagaaatgtcgttgcaaccgcaaccgtatgcggttgtaacgactttaagtttgattttaaatccatcattgcaacaaattcattcgtcgttattttgatccccattaattcagctacatacatagcatcactgcctgataaaccgagtaaaaatgcaaaaggactaaagataatggagaagattttttgaattgttaaccccgttacaaaaaatcctaaaatcccatttaaacatgctgttaaagctacataaccaattaccatagctaaaataacgataaccatattcatcccaactaacatactgtttgaaatagtagaaaagaaatcctttttttcatgttttgaaggtgtgtaaacaacgtcttcttctttcgaaacttccacaggatttaatacattggctaaaattaatgcgttaatacaatttaatggaatggcactgaaaatatatgttgctggcaccattgataaataagcgccaagaatggatccgctaacgctactcatactcataattccaaaagttaataatcgattttcttttaacacagataattgatcacgaacaaccgcaagtgcttcggtgtttcctaaaaacatcatttgaatcgaaaagaaactttctaactttggtaaacgagaaatctttgaaataactgcacctactttatcaataatccaagttaagattccgaaataagatagaatatcgaaaaaagtaataacaaaaatgataggaagtaacgcactaaagaagaaatcaatgtgctgactttccatagctgaaggaaatgcaaatcgaataccttcattcgcacatgctagtagccaactgaaaaatgacgcaattttattaatgataatactgccgagctttgtgcctaacataaaccatgtaataaaaagctccaataggatgagaattacaattggtctccattttatatgttttttattaggcgaacataagaaaacgattaatatgacaacgaaaatccctaacatattcaatatgaaatgcatgtcaacaactccttgaggcttattatttgtatataaaaaagcatctattcttccaaatttggattatgattagaagttatgaagcatgtaagttatgttaggaatcaatgtattttaatttgctttattttgagtaatcgcagtaattatcgaacaattagttgttttcaattgttttgttggatattaaacgtatgcgattttaaacatcgtttatcccggattaacgggcagtaagacttttacctcaaaattcagggaaagcaaagaagtggggatgggctgcccgcaaaatcccgattggtaagagctgattaaaatttcactttataaataagaacggtgagttggccatgaaccttgaagtttccgaagctgtataatttgtcctgtatgataagcatcatgcaaaaggatattcatatattgttgccaaactggtagagaaggacttagttgatctagttctgcttcttgaagggcggttaatgaagattgtaaggcatcatgtacttgaagcgttcgcttttctcttcaataaaccttctctatagttgaacaagagagtgaaatacaacgtataattgagccattaaaaaatctcatttttaatatgatatttaataatcaaggctttcattgagtcagaatgaaaagagtataaacctttttctgtttgctcattgattaaagttttttttaagttgcaaaacggttctaaaaatatagaaggtaaaattcgataaaaatagaatatgttatatagcaaacaaggaggggataaaaatggaggtctatcatataacgagcagaaaaagggaaacatacaacgttcaggtgaaatattcgatacttttcgagtgtgcacttggcattgcagcgattactcataaaaggttaattgatactcttgaaaagactcaaagtgaatgggaagaaattaagaaatcattaacagaagaaatgagagaacacttacagtttgtagaagaacataatacgtggaaagcgttactccagttattgtatgaagaggattttcaagatttatcgcagtttaattttaaaattgattcactttcagaagaagatttgaaatttatatgtttaccgtttttaggagagaagtatgaagagaaaagacgtttagctgcaacgggagttgtatgtgcaatacacgaactaaaggaactaacagataatcatcagtttttttctacttatattagctttatatgtaatgtagatgtacaagtgctgaaatcgcatttaatcgctgttatgacaggttggtatgagagtgttattaaaagagaggaagaacaaatactttctatattaaaacgagattatgaagcaaaaaatgaaatgaataaaaagatgaaaccagaagagtttgttgagtgggctactggtggcattaactatatgccagaaccaagtgttcattacgtgcttcttatcccgcaaatgacgtacagaccgtggaatattgaagcggatattgaagatacgaaagtatttcattatccagttgcgaatgaaagcattcatcctgaagatccgtatgaaccgaattattttttagttcaaaaacataaggctcttggggatgaggcgagattgcgaattgtaaaaatgttgtttgaaaaagaacgtacattacaggaaataacggaaagattacagcttggtaaatcgacagtacaccatcatttgaaattgttacgtgcagcgaagttagttgatatacatgacggaaagtatgtattaagaaagaaagcagtacagtctttagcgaaagaattagatatgtttttgaatagataattaacaacgagaatgtacataaagggaggaatataaaagaaaagttggtgtgtgaaattgaaaaatatattgaaaaatcgttcgtacttttttatgtggattggtagtgcaatctctgaattaggaggggctttcggaacgttatgtaattcaattctagtatatgagttaacaggatcggaaatggctttaagtagtatgtggctattatatttcatcccatcactcatactgcaattaataagtggcccatttattgataaatggagccggaagtggattatgattttttcacaatggatacgggcgtccgtattcttattacctttggtgatgctagttacaggtagtatagaagtttggcacatttatgttgttcaaattgtagtgggacttattacacctctttatacacctgcgagtcaggcaattacaccgagcattgtaagtcaaggacaacttcaagacgcaaatgcgtatattgatggaatgactcgtctcatgatgtttcttgcgccagtattgggcggagtagtcattcatttcattggaacagaacttacattatctttcgtatgtatttgtctatttgttagtggtgctttcttactttatataaaagaaaagaggactacaacagatatacgaaaaacgtggctagaacaatttcttcaaggttttacatatttttttacaaaaccaatcatcgtttggctcggtatatttcttactttcgtgcagtttggagtaggggtaacgatggtcacaaatcttccttatataaaagacgagctgttagcgggatatgcagagtacggctattttatggcaggttttccacttggctacgtaattggctcagtattagtgggaaaagtaacatataaaagccggcgtatacttatgcttggaggattgtttataggggggctcacatacatttcattagggttcaatcatagtattatcattgcaataataattgaagtaatagcagggatttgtattgcatttttcaatgttcataacacaacaatatgccaacaaatcgtcccaaataatatgataggacaagtattttcagtgcgtttattttttatacgatccgctatgccattaggtgtgttagtagggggaatattgagtgaaatgtggggagtaagagcgctatatgtaattatcggtgcaattatatgtgttacatctttaatagggatgttatttccatatttcaaatttttagatgaggcgatagaaaagaaatcagcataattcaaaaaattaaaactttacaattgaaaataattatcataatcaattataatagaagaatactagtattcgtattacaaagagggagtgggatatatgtttatcgaaacgaaaacatttacagtaaaagaaggcacatcaaatatagttgtagaacgtttcactggagaaggtattattgaaaaatttgaaggctttatcgacttgagtgttcttgtgaaaaaagtaagacgaggagacgaagaagttgtcgttatgattcgctgggaatcggaagaagcatggaaaaactgggaaacaagtgaagaacacttagctggacatagagcgggccgtggtaaaccgaagccagatcatattattaatgtggatcatgcggtttattatgtgaaatcatcgaaatcggcttatcaacagtcgtaatatataagtagaggatacatgttgtagatgctaacatgtatcctctttttgtagtaatgggggatggaaatgatggagagtttttcattcattacaaatgaaaaacataaaaaattggtacaaacaattttaaatgaatatttatttagagataaagtaaatggattcatgctaattggatctgtcgcaagaggtgacgcatatcctgattcggatttagatttctatattcttttagaagaagggcaaaagaaaaaatttcattttgaaacgagtgatgatattttagttgaatataagagtgcagattttaatcaaattcaagtaaactttaaaaacaatccgatggaattttactcatttctagaaggggaaattttgtttgataaaagcggtgagttgaaaaagttaaaggaaatagctacatatgaatttgaaaactatcgtgtttctagcgacaaaatgaagggcatttctcattggttgcatagttcattaattaaaattcaatctgccttgaaagcaaatgatgagttaaaagcttcatacatagttcaaatttcaacttggacattgttagatgggatatgggctgttaataataagcctataccaccagcgggatctgttttgaagtatattgaaacattatctaaagtaccaactcattttaaaggttttatcaataaactgtttttaggtgatacgacagaacgtacctctgcagcaattttcttgattgagtgggttttacacaatttgaaaaataaataatgtggctattttatataggtaaaataatatttcgcgtcgaacagtttatggaattacagtcataaaaaacgttctaggctatagaaaaaaatattagacttataaagcatagtcttagatggaacgcttgaatatcttgccttacatatttaagtgttatgaaaatgaatccatataccctctgtttaaaaggagatgagtacatgaagctgaatcatttaaatttatgtgttgatgatttatcggaagcgagacatttctttgaaacattttttgattttcaatttttggagcaaaaagggaaagcacttgtagtgatgagtgatgagagtggttttatacttgtactaagtgatccaaaagcatttaaagggaataaggaagttacgtatccggaagcttttcatattggttttttagtggatacatcaagtgaagtggatcaagcgtataatcgtttagtagccggcggcattgaaatagacaaggaaccttatttgatgcgaggtagtagttatggtttttattttacagtatttaatggcttattaattgaagtgtcttgtcttgattatagagaaggtaagaaagtttcaaagcttaatagtaatcatctagagtaatcatttgaaggtgtatagaatttaagtatgtatcatattagaagacggattaagaaagtttcactgtaaagtaaaaaagacagactaataaatagtctgtcttttcacattaattcttcacatcatcataaagttcaagtgcctctttcacattcaatccattttttacaatgccatgtattgcttgaatcatcgcagctgggtgctcggattgccatatgtttcggcccatgtctactccaattgcgccttcttgcaacgcattgtacgtaatgtttaatgcgtcttcaattgaatctaattttggtccaccagcaatgacaactggggcagggcatgtgctcgttattttttcgaatccttcacagtaatacgttttaataatatcagcacccatttcagcacatacgcgggaagcaagtgctagaaagcgagcttcacgtttttgtaattcttttgcgactgcggtaatgccgagtactggcaggccgtaatcatgagcttcagaaactacatttgcgagatttgtaacagtttgtgtttcatagtctgatccaatgaaaacagaaacgccgacgccaattgcgttttgttttactgcttctttcacaggtgtaacaattgtttcattcgctaaatctttaccgacgacagtagcgccgccagatacacgcataaccatcggtgtgctgcagttttcaggaatacaggagctaagtacaccacgcgttaaaaagagagaatccgtgtaaggaagtaagtttttaacagtttcaagtggctgttcaagcccgtgaattggtcctaaaaagtagccgtgatctatcgctaacattaccgctctgccatcaggtaaaattgtatttaatcgatttttaaatccccaagtcattccaaatcactccttcgttaatgttggattttccgtttgtaccgtatctttatttggtaaatgtggtgactttataaaaacagctttaaaaggtttgtcagaatggttaatcagatagtgagattcatgagggcgaacttgcaggacatcaccttgtttaattggaactctttcgttatttacatagaagtctatttcaccttctaatgcataaaagacctcttcgcacgtcgtatgataatggttttgaaactcctggcccggttgaatgacaacaaggccaagatcaatatttggaccttgtattaaatatttcggcccgttatcaccgaagcgataggagaagtcattttcattcgcttttaacatacagttcactcctttatgtaatgtgttacagtgcaccaggcgcaatccacatatgtgaggtgagccctttatcagctaaagcgagctgactgtcatatacagttttccatgtttcatagaactctttatatagttcgtgattttcagtaactggttcgaatgtttgctcccactgtacaaactcttcggcagtttcttccatagatgaatatatgccagcaccaactccagcagcaatcgcagttcctaaagcagctgcttctttcacaacaggtacttttacaggaataccgagtacgtctgatagaatttgtggccatagttttcctttagcggcaccgccagcaaaaacgacttcagaagggaatgtaccagtaagattttcaattagttttaagtttccaagtgtaacgaaggcggcattttcttcaatagcacggaacatttccttttttccgcatttgtcagcgtctaaacttaaatttaagaatgaaggtgcggcatgacgccaagaaatgtagttcataacgtttgaaaaagtagggataatgccatgtgaaccgacaggtacgtctttcgcttgttcttctagtaattcataagcatctacaccgagtttatcagcaagtttcttttcttcttggcaaaaagcgtctcgaaaccagcgcataacgagacctgggaaaaaggcgattgtttcatattgccataggttcggaacgacgtgacaatttactcgaatcgcagcatgtggatctgttattggctcagtaacattcacttcttgttgccaaaagctacccccgcatattaacgtttgattcggtttcacgattcctgttccgagcgatgccatttgagcatctccacccccggcgacgacaggaatcccttcaagtaaaccagttaatgctgcacactcttttgtaacgttgccaattactgtaccagcttcatttactgttggtgaaaatggcaaagatagaccgcactccttagcgacatcgttatcccacactctattttgtaagtcaaaaatacctgacgtgcatccgtttgagggatcaatttgtagtacgccgcttagtttatataaaatccaatcgtttaacattgtaaaagagtaaatattattatagacgtcgggttcatgtttttttatccagagtaggcgtggtaaagcacctaatgaaaaagtttgaccagactttgtatataaatctttttcaagatgtgaccgaatttcttttaattcactaacttcgacggatgcgcgcccatcaacatttgcacacgcccatatttcttgcccatcttgatcatataaaacaaatccttctcgcatacttgtagcgctaatagcaagaatagaagaggcaggagtgttgcttttttgaagcacctctttcgtacattcttgtactagcttccaattttctactacatcaaagttcatagagcctggataacgaaggtcagatttgtgaatccattctttttgacttactgcaatttgattaccatgtaaatcaaaaagaactgctcgaatgctccctgtaccagcatcgaaagctaataaatgggacattaacaatcaccatcctttcgtaataaggagagggcagtttcctcatcggtaattaatgtatgaataaactttccttttaaggcaccataaattgcatctatcttttctatacctccagcaacaccgacgacatgattcatattgcgcaaaatagagagaggcgtgccaattagacgattatgatgcgagagctctaataactcaccattcgtattataaaactgtcctaaaatatcgcccgccccgttttgacttcgaatatatgtcatttcacgtagcgttaatttttcttcttttacaattgtagcgtcttgagataacccgccaataccgacaactgctgtatgtgcaagtgaagcgacatgaagcatatctttcacacttggttctgataaaatacttcgtgccatttcagtagaagatgctagaaaaggagtaggaataatatgaagatcaccttgcatgtagtgtaaatagttttgttttcttgggagatagtggtttactccgcctgttagcgttacgaatgaaagattaatagaactttcaaaatgaatgttttctagcattttacttatcgtttcaccccagccgatgccgagtaaatcaccttgttggagatgagtttctaaatattgtgcagcggcttttccgagagaagtagcataattgtttattggagtagggataatgaaagcatcttttaagtggaactttttcattaagtcacgttcaatgctcaagcaatgcaaaccggttccttttacgtgaaatgtaacgataccttcactgcgtgccttatctaataaccggacgactttatttcttgaaatatgaagaagtgaagcaatctcttgttgtgttaattgatctttataatagtaccaggctactttaattaataaattttcttcaaagttcagctgtgacatactcttcatccctttcaacaattgaccaatgcttaaacatatgtgtcacatattttgtttattccagttgaaacgattaatagtacattgaaaaaagtgttctagatatgaaaaaaggaatatacaatgctacaaaacaagtagaacaaataatcattttctcaaaaaatgttctgggtaaaggcaggtgacatcatgtggagaatgtgcccttattacaagtgaagaaaatgagtaaggcgttttcgaatcaacttgtgctaaaggaagtgaacttacaagtagagcatggtgatatatacgctttagttggtggaaatggcgccgggaaatcgacattaatgaaaatattaacggggttatattcgtatgatagtggagaaatgtatgtgaaaggaaagagacagcagtttgcaaatccaaaagaagcacaccaagaagggatttatttaataccacaagaaccgctcatttttccgcatatgaccattgaagaaaatatatgtattggattaaaggggaatagaaagaagcttaaagtaaaagttcagcaattaattgacagtttaagttgggatattgatcttaatgaacagggagaatcgttatctattgcgcaacaacagttagtagaaatcgttagaggattaataagagaagctgagattcttattctagatgagccaacatcgacattaacaacacacgaaattaagagtctttttgtgttgatgaaaagtttacaagaaaaaggaattgggatgatttatattacgcatcgttttccagaaatctttgaaattgccaacaaagtagcaatactacgtgatggaatggttgtaagccaaggtgatgtatgtgactatacatatgacatgctgatggagggactattgccaaaaggatataaacagaaagagaaaatagaagtagttcaagagacagcaaagacgaaaaaaatattagaagtggttgatataaatggtcacgcattcgaaaatatatcattcactgtacatgcgggtgaggttgtaggtgttgctggcattataggatctggcagaacggaattagcagaagcgatatttggattgaaaactataaaatcagggtctatcttattgggtggaaaatcaattgatacgtgttctttgcataaaaggctagacgaaggcctagtttatgtgccagaggatagagtgaggaatggaattttctcaattgcttctgttaaagaaaatattgcagcagcaagtttatatcaaaataatcgcttttttataaatcaagaaaaagaaagcgctttagttaattcgtttatagaacagttccgaattgttgtacagaatatgaataaagaattggcatctttatcaggaggtaatcagcagaaggtcgtgcttgcgaagtatcttgcatgtaatcctaaaattattattcttgatgagccgactcgcggaattgatgcgaaagcaaggcttgaagtgtatgagacgataaaaaaaatgaaaagggaaggactcgcaattttattaatctcttcagatgttgaagaaattatccaattagtaaaccgtgtatatgtaatgagaaatgggcgatttgtttctcatatggaaaaagaacaactgagtgtgaatgaagttacacgccttgcatacggaggtgtaacggaatgaaacgtatgtataaaatgcacgaaacgtctatcatactgttactactaatttatatagctactgtagggatgataaaccctagttttattcaatttaactcgttatctttactgatgaaatcaagcgttattttagtcgtgctagcaatcggtcaatcgtttgtcttatttacgaaaaatatagacgtatcagttggctcaattatgggattaagcgcggcagtttgcgggatgttgttaacgaacgggtataatgcattcttgtcaatttttgctgctgtaatgcttggtgctagtattggtttcataaacgggattggcgtcgcaaagtttcgggtaccagccattattatgacattagggatgctaggaattgctaggggggcaatgttaatcttcacaggcgggaagtggattgaagatattccaaacgattttaagcagctgtcatctatcatcattcttggtttacctataactgtatggttcgttcttattattttactactactatacttctttttaagaaaagtgccattgggaagatacttttatgcggtaggtgataatgaagatggcgcgaggcttattggtatacctgttaataaagtgaagatatatgcgtttatgatttcaggcataagcgctgcgctcgctggttgcatatttgttatgaatatcgggttcgtcccaaatcaaacaggtacaggattagaattacaagtaatggcagccgctgtactaggaggaattcatttaaaaggaggaacaggatctttatttggagctgcattaggagcgttatttttagaaacaataagtagctcactcgtctttttaaaaataccagcattttggaataatgctatttcaggttttttactattacttattatcatattagatagcgtcatgaagaggtggaaagcagaaaggaggatgaatctatgaagtatttttacagatgggaaggtgtgttaatcatattacttcttatagaattcattctctttagttttataaatagcgatttcttaaatattagtaatctcctttttagtacaaatgatttcctatttatcgcaattgcggcgataccaatgacttttgttatagtaacaggaggaattgatgtatctgtaggatcaattatggggctaacctcgattttaattggtgtgttttggatgaatgggattcatattttactagcagtaataatggcacttatagtcagttgcttagcaggagctttaaatggactcattataaaaatgacagatgtagagccactagtcgttacactcggaacgatgtttttatacggaggaattgcgcttgtcgtttcaggaggggcaggtgcttctggatatgaagggataagcggtttacctgatacttatgtacaactagcaaatggtagttttataggaatacccaatttattatggctacttattttattaacaattgtatgcacgattttgtttcaccgaacgatatatgggcgccacgtacaattaacaggtgcgaatgaaaatacagcaaaatacaccgggattaagacgaagaaagtagtaatcattgcttacatactttctgggttaggaggtggattaggaggagctttcttaactgcatatttcggttctgcacgtgctgatataggaagcgaaacaatattaccaatcattacagcagtcgtcttaggcggtacacttattacaggcggaaaaggaagcattatcggtactgtactggcgagtattttcattgggctcatgcagtatggcttgcaaatgacgggtttaacaaatgaacaatccaatgtagtaataggtattatccttattctttcagttattatgagacatttcaaattacatcaatttttagcggggaaaagacagagtttgcataagggggaaatgtcatgaagagaaaactagggattgtattgatcgtatgtatttgcctaattggtttaatagcttgttccagtcaaacggcagataagaaaaaagcggatgatgtgaaatttgcatttattccgaaattaacaggagttggcttctttacatcgggcggtgaaggggcaaaagagatgggagataagctaggcgtacaagtgaagtatgatggaccgtctgaagcgagtgtatcagggcaagtaaagtatataaataattttattaaccaaaactatgatgcacttatggtttcatctacgtcagtggaggggctatcgcaatcactgcaacgtgctaagaaaaaagggatgacggtgttaacatgggattctgatgtgaatccgaaagatcgttctttttatataagccaaggaacaccagaccaacttgctaacttattaatagaaatgacttctaagcaaattggagataaaggaaaagtagcattcttttattctagcccgacagtaacggatcaaaaccaatgggtaacgaaagcgaaagaaattattaaaaagaaatatccgaactgggaaattgtaacgacgcagtacggtgaaaataatgcacaaaaatctttatccgtaggggagaacatattaaaaacgtatccagatattaacgcagttatttgtccagatgcaacagcactcccagcaatggcgcaggcagctgaaaacttaaaaatggataaaaaagtagtggtaactggattttctacaccgaacgttatgcgtgattatgtaaaacgaggaacagtacaacaatttggtttatgggatgtaaaacaacaaggtgctctcgcaacgtatgtagcaaatgaaattgttgtaaaagggaagaagttaaaagtaggggatagcttcgaagtaaaaggaattggaaaagtgaaagtagagccaaactccattcaaggatatgattatgaggcagaagggaacggaattatcgtattaccagaacgagttgtatttacgaaagataatattgataagtataatttttagtagacaaaaaaacgtccgaatatatcggacgtttttttatttctgcattaattatgaacagtttctttttcgtttaatccaagtgtacgaccagtagaagtgtgaagatcttggaacaatcttggattttcagttagtgaaatgccatatgaaggaatcatttcttttattttttcttcccattctaccatgcggcttgggaaacatttttctaatacttcaagcatgacgtgaacagcagtagaagcacctggtgatgcgcctagtaatgcggcgattgagccgtcagctgcacttactacttctgtaccaaattgaagtgttcctttaccgccagcatcagtatctttaattacttgtacacgttgtccagcaactacaatatcccaatcttcacttttcgcgttcggaatgaattcgcgtaattcttccatacgtttttcatgtgataacataacttgctgaattaagtattttgtaagtcccatttcttttacaccagcggctaacatcgttaagacgttattcggttttacagaaccgattaagtcaagatttgagccagtttttaagaatttaggtgagaagcctgcgaatggtccaaacagtaaagcttttttattgtctatatatctcgtatctagatgaggtacagacattggcggagcgccaactttagctttaccgtacactttcgcatgatgctgctctacaactttttggtttttacataccataaatagtccacttactgggaagccaccaatatgctttgattcagggataccagtcttttggagtagaggtaggctaccgccaccgccgccaataaagacgaatttagcagtatgatgctcaattttaccactattcatatcgtgtacttttacttcccacaaaccatttttcgtgcgcttaatattttcgacactatgcttgtagtttagctcgacattttttgtttttaagtaatcaaacaacatacgtgttaatgcaccgaagttaacatctgttccagagtcaatcttcgttgccgccatcggttcattagatgtgcgaccttccataatgagtggaagccatttttttaatgtttcaggagcatcagaaaattccattccttgaaacagtggattttttgaaagcgcttcaaaacggttttttagaaactcaacatttttttccccttgtactaaactcatatgaggtagtggcataataaaatcttgtggattacgaattaatttgctctttacaagatatgcccaaaattgtcttgaaagctggaattgctcattcacttttacagccttactaatatctatagatccgtcagctttttcggaagtatagttcagttcgcatagcgcagaatgccctgtacctgcattattccattcgttagagctttcttccccggcacttgcgagtttttcaaaaactttaatttcccattctggtgctaattcttttagtaatgagcctaatgttgcactcataattcctgcaccaattaagataacgtctgttttttgctgcatgttgctcatgataatctctccatcccctatattggcaaaaaagtgtaggtgttttctatgtctaagccgtaaaagagaaacaccgcctaggccccacctaggtgtataccttttttgtctcaattatataaccatctcatactctattataataattaatagactaaaatatctagtgttatctgataattttaaactatttaacgttttattcgctaaaaatcttatttaacaagctcttttaaggtggtaaatagaaaaaaattacagtttaaaattatctcgaaaaagcttacgtatccttaagtgactaaatcgagtacctttttatgggattattctttccgtaatggtaagattattctgaaaaataaaaaggagggactctaatgtgtacaaaagaacaaatttcaaacttatttcgaaacttttcaataaaggaatgtaaagggtcaagtgatttatatgaatatttatcaatgaaaattgctgaagatgaggaagtacttacactatcgtcctatgctcagataggtcaaccagtcccaaacttactattaggtgcagtacattatttattgctagcagggaaagaacatcatttaaaaacgtattatagtagtttagttgaaaatgctgatacaaatttagataaagcttttaatcattttaaagatttctgtaaagagtaccgagaagaaatcattactttgttacaaacgaaactcgttcaaacaaatgaagtaagacggtgcgcatacttatacccaagtttctgctacatatttaacaaagtgaagaagccgttagcgttaattgaaattgggacaagttctgggttgcaactgttctgggaccaatatcgttattcgtacgggacggatgaaatgtacggaaatatagattcaaatgtgcatgtaacttctgaaataagaggggagaatgtgccgcattttctaaaagaaagcccatctgtcgtagaaagaatcggactggacttacatgtgaatgatttacataatgaggaagattatttatggttacgtgctttaatttggccagagcataaagaaaggtttgagatgtttgatcaagctgcatctttagtgaaaaatgaatctgtccaattaatagaaggagacggtgtagagctattatcatctattattgaacaaataagtgaagaagctgttatttgtattttccatacacacgtcgcaaatcaaatacaagaacaagtaaaacataagttagaaaaacaaatacaagaaattggcgcaaaacgtgatgtattccacctgtataacaacatgtgggatcgtgaccttcatattgattattatattaacggaaacgaatatcgtgaaacggttggagaaacagaagggcatgggagatggtttagctggaagattggaaatgagacgcttatttagattaataggggcgccctcacttgtaaaagaagggaccataggctcaagcattgactaaatggttaaggaataaatgtattagtaacatacaaaaaatgcttcggagaaatcctaagcattttttgaattacatttaaaccccataatggatcatgtacttctgttctgctgtagcttgtacaatttttgaagctaactcattcagctcatcagattttctgaagaactttgaagatgtaactgtttcatagaaaattgctaaagattcagaagggataattgtaatccatcaacttgtgatccgataaagagattttttaacactttttcagcgtaaattttatcctctgtattcattcttgaattcctccttttcataaaaatataccttatatttttattgtaataaataaattttcatgtaaaatgaaccttttgtgaaaaacgagcgaatatagtgtgaaggatcatgagaggggaacggagctttggatgaagtacaattaaaagaatggctatataaacgaaagtatgttgtccaaaaaagagtttgagaaagtgttactttggattgttgaatagatatttagtaaaagaattaaccaataattatattatgtaaactttatttataaaacacccatttaaaaaatggatgttttatattttaatatattaggtgtaatatatagtttaaaaaagcggaatactttgcggaaagttaaaaatatttttcggatcatatttcgcttttacttccattaatcggtcaaagttgcaactgaagtatgcatctggccaatttttaatggataggtcaggcgtattaacgtagacaccttttgtaaatggaagcatcgctaagcggaagtcttcaacccatcgaatacttccagcggcaccttctggttgctcccaagtagcgaatattgacatgtttgatagtgcttttcggtaaaagtaagcagttgcctcatttggcacctcagcaacagcaccgcctaatccgtggaaaaatacggaggtggtggaaaagggaggtgcattattaataaagtgatcgataatggataatccttcttctggtaatagttcatatacatatggaccaacacttttaaatggtaaaggtgttgcaggttgcttttcagctattttcgctgctgcttctgcccatggtatttcttcgatagttacttgcattggtgaaccagcttctagtaatggctgtagtagcgactgcaattcttgtacagaaccgagaaatacaccttgcattaataatgatggttctaattctgcagacataaaaagagtagttgtaaatcgtttattagcgcaaggtagcgtatattcttgccaagaggttaatacaggttttaaatctgatatcccccagcttatttctgcaaatcctaccgtattaattttatgtgttcgaaacttaaacgaagtacatattccaaagttaccaccaccagcaccgcgcgaagcccaatagagatcgtagttacacttggcgttagcgcgtattatacaaccattcgcgtctaccatttctaattcaagtaaatgatcgagagttaatccaaacggacgagagagaatactatgtccgccacctaaagtaacacctgcaatcccgggagtaggacaaacaccactcggcacaactaacccttcagctgcaagtgtttcaattaaagaaatatttctccatccagtcccgatagttacagttccattattgtgatctatttctaattgtttcatttcacttacatcaattacaagaccagcattactgacggataatgcctcataattatgacgtccagagcgcatgcgtataggaacgttatgtagccttgaccagcgaacagcgtttactacatcctgcgtattttgagcaaaaacaatgattaacggaaatttgttgaagaatgtattgaattcttcacgcgctgaattataatcaggatcattaggtgtaacgatacgaccagtaagttcaattttttgattattcatttcagtcatctctccttgacgtgaaatatttataatgtggaaatacagaacataaagaagaactgacaatactttataagtaaatgaataaaggaaaaggattattccaataaagaaaaaggcagtgctacataagtagcgctgcctttttggaattatatgtatgtgctcaaaatttccccaggtaatccatcaatctcacaaactttctccgatgtaaaacctacacttagtaaaattttgcgagaagggatattattcggatcgataattgcttttagtacgtttacatctgtttgcttcgctattaaagctagttgttaatttttgattatgtacgtacatacaatatgtaattaagtgaatgaccatcatagtaattacagaaaagggtgaatacagcatatgaatcaatttgagcaaatgatgtacgttggtgtcatcatgtctattgtactatctgtaatgattttagggtccttatattataatcctcgactatcgttaactgattatccgaaagatattcaaaaagtagtttttccaaaatcgattcatgaaaaaaagcaaagcatttattttaatattgtatataatactattcttttcggtagtcctttcgtttctacatatatactacataagcatgaaaagttaatgtatatggatgcctatttacacacttttggtattttaatgattttcaatttagtagatttacttataattgatttgctaattttttgctggattactccaaggtttgttgtgattcctagtacggaaggtatgaaaggatataaagattataagtttcatttaagaggggctattgttgctactcaaattttagcaatcgtaagtttatttttggcgggaattgccacaactatttagtgtgaagaagggtatggagcttttataaaagataaggagatttataatatatagaattagaaatgagaatttgatagtattggagtaaggagttttaataacagtatattaaacaatattaatataccgttgcaaatgttttgatattatgtaaaattatacaattttacggaggcatttgataaaattcaaaaaaatttaatggaggttaatatgaaaaaagtaattggcgcagcaacagcaactgtttttggattgggagcgtttaccacaactgctaccgcagaaacaatcgtaacagcagatgtacttaacgtacgtgaaaaaccgactacagaatcaaaagtggtcgaaaaagtaaagaatgggcaagagttaaaagtcataaataccgaagatggctggtcaaaaattgagttgaatggtaaagaagtgtttgtaagttcggagtttacaaaagatgtatatcatgtaacggcgaatttgttaaatgtacgcactgaagcaaacacggattcagaaattcttggcagactaaaaaaagatgatgtaattgaatcaacgcatcaagtaaaagacggatggctgcaatttgagtataaaggaaaaactgcttatgcaaacgtttctttcctatcaagtacagcaccaactgaaaagaaaactgaagagaaaacgaagcaagtagcgaaagtacaaaaatcagttaaagaaaagaaagaagtaaagacgcagaaagtagcaaaagcgaaagaaacaacgaaagcacaagaaatagtaaagcctaaagaagagttaaaagtcaaagaagaagtaaaagttaaaaaagaagagaaagcgcaagaaatagtaaagcctaaagaagaggtaaaagtcaaagaagaagtaaaagttaaagaagaaccgaaagtgcaagaaatagtaaagcctaaagaagaagcaaaagtcaaagaagaagtaaaagcgcaagaaatagtaaagcctaaagaagaggcaaaagtcaaagaagaaccgaaagcgcaagaaatagtaaagcctaaagaagaggcaaaagtcaaagaagaaccgaaagcgcaagaaatagtaaaagctaaagaagaaaaagcaagagaaatagcaaaagctaaagaagaagaaaaagcaagagaaatagcaaaagtcacgggtttataggtaaatccctttcctaaaaaacctaactttatcatacgaggaggtggatttcatgtattacaagtcacctctggacaggcttttcttcaaatcaatatttcttgcaatatcttagttgataaagcaagagatagttagtttagtttttaattaatcaaataaatctattaaaagaagaggagaaatttatttatgaaaacattagaaatgaaagaattgaaaggttcaagtaaggggaaggtttcagctttattaactcgtacaaaacaatggttgaaaaatgagtcttcagatgaaacatcaaataaagtttcatggacttacattggtcttggaatggcagttgtagttttagttatcatgtacccagcattaaaatcaggtacttttaatgtatctaattactttacttcaattactggcggcgcgaagagtgagccgtctggatggtcaaaataagtttttagttgaaagggcggttgatccgtccttttctcttaatttataggaaggagaaacatatacatgcaacaagcagttacatatgttgtttttttcttgtcgttaatgttcattattgtctttggtgtagaatttgcagggcaaacagttgttaacgttaaggcgaatgaaattagtgaatatgctgtaagtttagcagagagggatgggggctttactcctgacgtaatcgataaagtaaatcaaaagttaaaggatagtaatatggattctaaagattggaagatggaatatacacaaggaaaagtacaatttaatcaacctcttaccttcactatcaaagggaagtataaatataattcgtttaaattacttgaaagaggtataggtacctttgatgtatcagtacaaagtactcgttcaggtgtaggacaagtttattttagataataagcggtcttgaagtgtacggaaagaatgagcaaatatcgtttaagttaagatcgcagtttagaaaatgttcaatagtaagtaaatgatggtttaaattaaatcggagttcttagtagacttcaatatcgcttgctagtacttagcaataaagggtgaaaatatttcaattgtgagccgtctggatggtcaaaataagtttttagttgaaagggcggttgatccgtccttttctcttaatttataggaaggagaaacatatacatgcaacaagcagttacatatgttgtttttttcttgtcgttaatgttcattattgtctttggtgtagaatttgcagggcaaacagttgttaacgttaaggcgaatgaaattagtgaatatgctgtaagtttagcagagagggatgggggctttactcctgacgtaatcgataaagtaaatcaaaagttaaaggatagtaatatggattctaaagattggaagatggaatatacacaaggaaaagtacaatttaatcaacctcttaccttcactatcaaagggaagtataaatataattcgtttaaattacttgaaagaggtataggtacctttgatgtatcagtacaaagtactcgttcaggtgtaggacaagtttattttagataataagcggtcttgaagtgtacggaaagaatgagcaaatatcgtttaagttaagatcgcagtttagaaaatgttcaatagtaagtaaatgatggtttaaattaaatcggagttcttagtagacttcaatatcgcttgctagtacttagcaataaagggtgaaaatatttcaatttcatttgagatatattttcacctttttatatagatatcttcttgaaagagcggggtatatggggagttagttaattcaaaagaaaaggtaaggaaggggctatttatagttctattctaataggggtgaatttcgatgtttacaaaatgtcgagaagtggggattttattaatgttaataccgcttttactaatagcttgtattttacaagcaatgggagaggtgaacgaaaagggagctctataataattgatcttctaatcaaatttatgatgatttatttaataggttatgtcacttgtagttttttatggagagtagaagcagatttcaaggagggataatatgaaacgtttatcaggagaagtgtatcaagatgatgatcctttagcttttgcaaaaggatgtaaaaatggcttaatcattgcccttcccttttgggttgtagtcataggtgttgtaagttttattgtgtaaaaatttcataacaatgaaggggtggaattaatgatcgtttctaatgaaattgctggtattcaaactaaaaaacaagcgtatgaactcgctagaaaaatgacaaaacaggtacttcatgaaggtgctggattaacatggataagaacaacacaatcatttttaagtggtgcaattctttacgtaaaagataagtataaagaaaaagctaggttatcagatgtaagagaatttgttttgcaaagcgaagaaaaggaaggttttttggaacatatcacagatcacttagaaaaaggtcatccttcttatcatgcgttttcaattatgttgacttgtaaggaatctacaagaattcttgttatagctctttctaatttgtgtatgagaactgtaaaggagtgaagagatggggaagagagtgaaaaaggggaaagtgaaaatgaaagatgatattaaagaaatagaggaatatacatctagttgggatgcactggatttttggactagattcttttttgtaggaacggcagccttatgtgggacgattttattaattgctgtactttctttatttaattgaatattcattttaatgttatttgaaatttaaaggtaagtgatgtgatttaattgaagactcgaaaatgcaaaaaatgcaatggaacgggaatgatatttggaaaaacatgctcaatcagaggattcaaagtacatgaatctatggaaaaaacaccatgtactaaatgttttggtaagggtgtgaaatagagcggaaatgctattgtagtagatttagaaattcactagcgagtagggataagatgtgtttacctaagcaatatgaacttgtagaaagaaaagcagaaatgataaatggtattttgaaattttatgatgaagggaagctaaaagttgttcataatactttcatagaattatgtgaattaaatccatatgctgtaaggggatttattgtaagggaattagaaaaacgagacttaaaaggcgtagaggaatcctatgatatatgtttggaagaaataagacagaacgaccttaataaatggctgagtaaaacgcctagaataatatattattcaggtgaaaaagttaaaacggaggtgttacaaaatggatgagctaaaaagagtaactcaatacaaagcttcagatggtacagagtttgatgtaggtgtggataaagatggtttgtattatatcggtgctaaatttccgtttttaacaacatcaaaagatggaaagtatacaaataactttgctggttatgttgctactgatataacggatgaaatgacagctaaggggatcgcgtcgtttgctttctgttgttaccaaagacaattgaagcattataaagaattaaattaaaccaaaattcctaattttgtaggtaaggtatattatttgaagtttattaaaagatggaggcgtatgaagatgggaaaatatcaaatagaagtggaagtaacgaaaacctataaagcttttgttgaagttgaaatacctgaaggtgcaaatagtgataatgttcaaagattagttgaagaaaaagtggagtcaatggatcaagaaaaattagattatcaatctactagtcattttgttctaaaagttaacgatattgaataaaagcgttaattagtttcgaattttaattttgttaaaaatgaaggtggacaatgcgaaattaagagctttaaaaggaagtgtacggatttatgggggaaatcatactattttttgtttgcgtgtacattttggtgacctttgctatttatatgacaataaaagatttttactttgaacaagaacaatctggtttacttgttgttcttgctgtatgttcattacctttatcggcagtgtttacttattttatagttcaattgcttgattatattacaatttgatttttgcttagaagtgtaaattcaaggaggtaagagggtgtgggttctataattccgcattatttgtttgtagtgtgttattcattagatgaggtattacaagtgcatgaaatggcgaaagaaatttttaatccgaaggatcaaagtgaaaaactagtaagtcagctgaacttaacttcttttttcgtcctttgtaatggcaggcatacaagatggggaaatcaagaagagtatatgaaagcaagagaaaagtatattaagtatcttatagatcgggatatccgattcgtggaaataacagaaaaagaatttaacagatttgaaaaagcttcgaaacaatgctttttttagaaaatcgtacttattatgagcatagaaaaaaacagcttatcattaatcagctaattgattgcggtttttacaaggatggaaaaaggcagctctatgaattaaagcttttggaattagaaaagtatttgaaaaacattaaaaaggagagagtaattcttcatagctgatgcaaaggaagtggagttagtggcatctaaaaataagtttgaaaaagaactggagaaagccgtgttgaaggtattaataaaacattggcgatttttcctattactatccggtatattatttgtttggattacaagatacgaaatttcaaatcgattaatccagattgtgccaattgtgaaaagggttgtacatgttagtctactcctactatttattgggactatattttggataactagatgtattgttttatataggctggaaaagaagtcttataaatacgttttagttattcctcatatgtccgatgatgctaaagtagatcaattaggagatatgattcgacaagtgcatggtgagggaagaaaaccactagaacaattgtggaagggtcgcgattggtacagattacttatgtatcagccggaagatatagatgggaagagtcaaaaggttcgattttatttaggtggaccagaagagaatttagcttatttagttaaagcgtttcgaaatgtatataagaacgctgaggtcatagaacaaaatatagaagatattccgtttccgcgtaataaattgtttggtggtgctgttggcgggagaatgaaattaaagacgaaaaagtctttatcattagcccagtataaaactgataaactcccacagcttataagtggaatggaagaaaagacttggattgatgtttctttttcaccagatcgagactatcgattaacaagaagaatcaaaaaagaagaagcagaattaaaggatcgaaagagaatagaaaaagatttagatgtgtttcagaaaacagaagcaaaggttttaacgcaacgatttttagggaaagaaacagcgtttcaagtttgtgtttctgtagcgactgaggtatatcctggtgtcagaatgctaaaaggtttagggaatatcatagcgagtatgatggctgatgtaaatgaacttcgttaccgttcgtttcgtcggtctatttggcgtatcccaattccttattacgggcgtatgacttggactggatcagaacttgttaatttgcttcaccttccaaatatcaaaggtgataaagaggatgtatctgaaaataagattctttatttagaaagtggagagaaaatgttacctgaaggtattttatctgaagggttggaaatcggaacgttagttcatcctctagagaaaaaccgtacagtaaagatattgaatgaagtgtttaaaaaaatgggatgtatagttggaactactggtgcagggaaaagtactgtagcagctaatgtgctagatagtgctatgaaactttggattgaaaatccagatgatgcaagtggtttttcattgtttgatccaaccccagatttggcaattgttatgttaaatcgactgttaaaggctgaattagaaggagcaaaaataccttgggaaaaggtgcatttcattcgttttcgagatactgattatccaccggcgattaacttattacattgtaatccaggtgaggatatgcaaacggtggttgactccatttttgatagtattaaagctcttgttccaaatccagccccacaaacggagagaattctaaaatcgattattggaacgctattatgtgatggaagccaaaagcattctacattaagtattatttcattttgtacagatgaattgtttagagagcgtgtattagatggtttagaaggtccagagtcaacgtactatagaaatgtttggaaaaatgaaatagggaacgcgctagaagatagtgtgcagcctttgttgaaccgattggatatattcaggagcagtacatacttaaaacgtatatacgggcaatctgagttcgctttagatatctttaattggatggaaaaaggacatattatcttttacgatttgtcaggtatggcgaatacagatattaagttaacgattggctacattatgaatcagtatcaccgtgttgtgcaaaaaagacaggtggggtcaaaattacacctaacgtttatagatgaggctcacaaagtacaagttccaattctccctaaaattgtagcggaagaccggaagtacggattgggactttggattattacgcagcaaatttcaggacagctagataaggaattaacggatgctcttacggaaataggcggtaatttctttgtttgtagacaagggaagtcttcggctaaaactctagagggagttatgcaagggaaatttcgggctgagtatttacaagggttacccgacttacatgcagccattcaaacgcaagataagtttgaaggagaagcgaaaaatgtgtggtgcatgataaaagcgaaacctctagaccgctatagaccaaatggcaagattgcaacgtatggaaatgataaagaaattgctgattctaatgaatggacatacaaaaaaataggtgaattggagaagcgaggaaagtcagctgaagaaatagatcgagaaattaaccttttcttatatggccaagacataacagcttcaactaaagtgaacttgaaaaaagaggatgaatcactctttgaaaaggccgaaaaagaggcggcgcaagaggaatcgctctttgagaaagctgaagaggcggcgcaagaggaatcgctctttgagaaagctgaagaggcggcgcaagaggaatcgctctttgagaaagctgaagaggcggcgcaagaggaatcgctctttgagaaagctgaagaggcggcgcaagaggaatcgctctttgagaaagctgaagaggcggcgcaagaggaatcgctctttgagaaagctgaagaggtggcgcaagaggaatcgctctttgagaaagctgaagaggcgacgcaaaaggaatcgctctttgagaaaaccgaagaggcgacgcgagaggaatcgcctgtcattatggatatgccttttccctgggatatggagaacaccgatcatatttttttaaaagagaaagaggaaattaattatccgtttgaaacgggggatgacgataaagaaaagtatcccgttgaaattaaaaatgaggaattacagaaagtagaaaacgctgaatcaaaagaagaaaaaagtatctttgacttttgatggtgggaaggaggatgaagatgattttaaccactgaggatgaacaattattgatggatattcatacacatatctatttagattttgaatatattcgtatgaaaaattatcctaatcataaagaaaaatccgtctacgcaagactggcgaaactagagaaagaaaactacatcaaaagtgaaagacatccagtagcaagtattcgtgggaagcgtaggcgatcaggtaacggatcaaatatttatacacttgataagtacggggttgaaatggtgcgggagttgagaggggaggttcattggaattacaaatggtccaatcgagttgcgactttcgtttatcatagtttgatgttggctcatgttgaatgtgccatgttagagcaatcaaaggcagacatcccaattggaataaaagaatggataaatgaagcaagaggaacgtttcaatatgacaaaaataaaagtgctgttattcgaccggatggattggctgttattggcttgaaaaacagaatcgaaggtaattatggcttgtttttggaaatggaacgtacttatggaacgaaagaggttatcgaaaaaaagctacgaaggtataacgactttttaagccgagaggaatcggttaaaaaatatgatcgatatgcaggtctaacatacccaatagagaaatggcgactaatctttattgctggtaatgagggacgacaaaaagaattgttacggtatatgcaagaaatggagagcccgcaagtacctgtttatgtcgtgatgtttgaagaagtcttacaaaatccatttggagcgatttatcggaacatcgaaaatcctaaggagaaagtgaggttataagagggtgtttcgatttgtactttcaacaattgtttcttttataacggcagttattgttttagttgtatcaaaagattttatttttcgtagattcccagaagcacaaccggtttatgaagaaataaaatctatgtttttagagatttatggaaggtatggctgggaagggttacttgttgtaacagttgcagttatgggcctttcaaaagcatttgataaaaaaggttaggagtgaaatggtgtgggattaaaagaaaggttgaataagtggagggaaaaaaggaggaaacctttccgaataccttcgtataaagcgaagaagatcgggaatgtggtcttctgggtactcttcttatggatgttcacggtttcgattaccgggcttattacgaataataaattgaaagcaatggtgcaaaaggggccggattctaaagtgcaattagatcagaatggagctacacggccagaagcggtagaatttacaaagcaatttgcaaaggaatactttacctggaaacgtggggataacgagcgtgctaatagagaagggcgtttaaaaccctatttattagaaggagcagacccacaagctggattagatatgcacagtcttcagtgggatgcaaattatgtacaagcttccattgtgcgggtaaaagagactggaaaacaaagtgcagatatggttcttaaagtggattataaacttactcgtcaagatgaagggaaagacgttacagaaacaattgctgtaccaattcaaacggatggaaaagggtttattgtaacaggaaatcctcaagtggttaaagtagacaataaagcaaaaatcaaagttgataaagatgaaaagcagtcagatgaagcagattataaagcgaaacaagaaattcgcgacttcttaccaactttcttcaagtcttacacaacagcgacccaaaaagaattggagtatgtattacacaacaaagatattaaagggttagaaggagcgctacactttgaacaaatcaaagaaacgaaggtatatgtaggatcaaagaaaggtacgtttgatgtttatacaattgctgaaatgaaggatgctgtttcagaatccaaaatgacaatgaaatatgtattaacagttaaaaaagaaggaaaacaatatatcgtcactgatatgactgtgaaatagagaggggaaaataaaatgaatttattaaataatatgatactaggatttggtttggatggagcgtatgactgggttaaaacacaagggaaatatgctttagggattatcattattgggttagttatcttttgtattgcgaagcgggcatggggcttccttgttacaattgttatcgcgggtggccttggattcttccttgtagcagcaccagaaactcttgaaaaagtaggatcattcttaggtggaatgttaggaatgtaattaaataaggaggcgttcttgctgatggaagaaaaatcaaaaccttttattgtatatactttcggaagttatatgaaatatgaacgtcgccaatatgaattattaggctatcgtcttccacgacctgtgtcgtggaagatgttaggctattatgccttaatagtattggtgtttgttatattaagagttttcccattaacttcttggtttattggaccaattgcagatgaattttggcttccatattatattatcattccaggttttgcagtttggggcttagatacgtataaaacagatggtaagtcatttttagtgtttgctagatcatggattttatttaaattaaggccacataaaatgtcacgctttataaagtttgaaaaaccaaaaaaatatgtttttgaaagtcctattttcattcgttaccgtgaatcggatattgttcctattatacctacgagtcaaggggaggttgaagattacccgttgactttaatagaacaagagacagaagaattcgaaacaatgcgtttagaagaagacgaatggtattaaaataagaggatgaaattgaatgtttaataaaaaatattgaaaatatagaaggtgaggatatttaatgcttgcgttaaatagtgtatcggaattcccaattaatcatgtagaggataatctttgtttttgtccagatcagagggtttggagtatttatgaagtcgaaggttttgaatatgaacatcaaagtgatcggatgaagaaaacatatttctcaaaccagaagtctttatttacacaattagaaagtgattttcatttacttgtcattccaaaagtaactgattctgacgcaattatagatgaacatattgcaagattgaaaggacctttgtctaacacggcaaaggtcctttttgaaaaagtgaaattatatttgcaacaatcatcagtctcaaaagaaaatacagaatatcattttttcttattggtgcaattaaatcaggatagaaaagaaaaacaagtcaaaaatccagtaattgaaacctcaaaattcgcacgaaaatttataaaggggtttactgaaacgccgtttcgagcaatgggaattgaagaaagtgatttgttagaagaagagattaatgattataaggaagctgaagatggtatttataatcaattgttaggcgcttttcgttttgtgagaagagcgacgccaccagttacaaggttcttaattgaacataatttcagtcgtggaatgacagctccagaaacagtgaaggattggaatgtaggaagaaaaatttcatgggtagatgaaaatggagaaactaaaaaggctacacgtccagatcgtgatgctattctccgcttaactgagtgtgaagtagatgaagagcctggccgttgtattcgacttcaaaggagaaatgcagagggggatttagaagaaagttacgtttcgtttcttgcagtaagtgatatggacccacaatcacattttccaggccgagaatggatatatcgtatacaatcgcattctttaaaattcccggtggaagtaagtattcgtggtcatcatatggagaatgtgagtgttctaaaaggattgcaaaatagcgagcgggaattaaatgaccaacgtcaccaggcggcacttggtggaacagtagaccggactgtagatcgtaaggcggccggagttaaactgatgcaagacgttttccagacaacgggtgcaccaggatttgaaatgagtattttatttgctgttcatgctcaagatcaaaaaacattggctcatcgcgttaagaaactaattacagagtatagaaagatgaaaattcaattagtaaatccttatggcgatcagatggcatatttctatgaatttttcccaggggccaaacgctataataaagattttaaaatatatgcggagccaggagttttagcacaaggtatgtttggggcaacaacacaaattggcgacaatcaagggttctatattggtcgtacagttaaattaaatcgcccagtctttattagaccagacttagcagcaaaagcgctagagaacttaaataatgaatttgatagtttatcagtaatgatagccggtatgacagggaaagggaaatcgttcttaatgaacatcttattatactggattgttatgagcgatgggcttgcattttgtgtcgatcctaaaggggatagaagtgaatggccaaaattgctcccagggtttaagaaaaataaggatcaattggaagtgtggactttaggacaaagtgaacgtgataaaggatgtttagacccattccgtgttagtgcaacaaaagaagatgcgatgagtttatcgttggaagttttaacatatttaacaggtgtaacgctagagaattcaaaatatgacttcctatggacagcaattcaacgagtggcaaagaaagaagagccttgtttatctttagtaaaagatgaattgtttgaaatgaaacaagatggtgaattgatccaagaagagttggcattattaacagaattagtaacacgtttaaatacaattgaaaattcgccacttgcaaatctattgtttggtaagcctggccaggattacagagccttagatttagaaagggctttacaagttttacaaattcaacatttatcattaccaccattagagcaaactgtattgagtattactgataaattatcagaaagtgttcttacagctttaacagcattcggtaaatcccttatgctttcaacagatcgtaagaaatttaaagtttatattcaagatgaagctaaaaacgttatgcgaaatcgtgaaggggcaaaactttcggatgaaattattcgtaaagggcgttatcacaatacaggattatatcttggtacacaaaatgcgagcgattttaattcagcgaataaggagattgccaacgttggaatgaaattctcctattgcttgaaaaatgatgctgaagcaaaagaaatgttaggatattataatttgccagtaacagacgctaatataagaatgttgcagaatttaaaaaggggtcattgcttgttccaagacatctatggacgtacagcagttattaaagttgatcctgttttcaaagaattagcagaggcatttgattcttcaacgaaaacagcggaagaacgtgaacaggaactcgcgggcgcttaatataaggcgaaataggagtgaaggaatcgtgaaatataaaagaacattgggctatttagtaggagctattatggctggagggttaattgtaacaacccttacagcctgtcaatctactaaaagtgaagtgatagataatcagaaatcgattaatataaaagcggctgataaagcagccttggaatatatgaaagcttatattgaattagataataaaaaaatgaatgaattgcatataaatgaatacgaatttttgaaggaatacaatgtaacatatccaggggcaagtgataaattgaacgggcgatatgagctgtttaggtatgatctagaagaaggttcaaatgaattttattacaaggctcgttattatcatccaggtacaggtgggaagagtagtgtggaattaaaaatgataaaagataaaaaagatggaaaatggaagaattacggttgggcttggggagatactcacaatttagagtccattgtaggagataagaagccaatacaagtccataagtgggagggggaacgagaatgaaaaagctcttccctctttttatggccatttttattttatttgtcggtactgtgccgaatgtagcctttgcagaggacgaaccaaaagcgtcagaggccaatacaatttcaggtaacttgtttgataaatctaaacaagaagattttgagaatgttcattatgagatagataccgcaccacataaagacgatgagaaaggctttttctcaaaggcttggggctatatgtttggtgatgattctgtggggaaagatatacagcggaaaattaatggagttggtcaatggatagtttcattaatgttccagtttggggtttggttgacaaaaatattgttatttatagtagaacaatccttcagcttagacattatcgatgttgttgcagataaattaggtaaagcaatgcaaaatatagcggggattggaagtaaaccggaatttgaaagtgaaggtttattcccgtcgattattaaaatgacatgtattttatctgttatatattttatttatctgttttttgtaaaaagacaaatgacaaaggggataagtgaattatttaaggtagtgtgtgttattgcagggatattgatttacatcgcaaatgcaccagcgattctgaaaggaatgaatacaattagttctgaaattagtcttcaagttttaagtaagacaaccggaacgatccatgggaatccagggcaaacaaaaagtcgggctatagcgaatgtaaaagcacaaatgtgggaattgatggtggaacgtccatatttgtacttacaatatggtcaagattcactagacactattggtgtcgagagggtaaataaattaatcaatacaccacctggggaagatagggttaagttagtaacagaagatgttaaagaacataagaattttatgatgacaaatgagtcggtaggggagcgattgatatttacatttatgtactacattgtaaatacttttgcaggagctccaacagcagttatatgcttgctgatagtagcgtgccaattgttatttatggtaatgagtattattggtccaatagcgatggcttttgcattactacctaaaaataggcgcgttttaattagttgggctgaacaatggcttaaaccgttagccgcaaaaatattcttgtcacttattgtaattattctgttttcaattgctgggctgttatatgaacttccggaagcgggaacatctggctatttaatgacgatgatccttcagattctggtatttgtcctttgttatatctttagagataacatcaaagcggcattccgtaaatcgaaggttgcgtataattcatttacggatttagagtatatggcaggcaaaacaaaggatggatttaatcgaacaatggatggcattaatgcaggtgtaggaagagcaaaagatatgtttggagattctgatccaaattatatgggggatgatccttctgaacatacagctgatgaaagcggaacaaaacaagctaccctagatgaagagaaagtttcgggagaaagtgaagaagaaaaaacaaaatatgcaagtattggtgaagaagacgaacaaacagaacaacatcaagacgaagaaaagcaagtcgaggaagaacaagaaagagccacaattgatgaagatgaggatgaagtggttgtaaatgcagagcaagaagagacagaagagtatcaagaagatcaagaagaagtcaatccagaaaaccttgcatcgttagaaggagttgaagaagaaaatccggagttatctgaagtagaagatgcggagcagcctgaacaggatgattcttctcaatacgaaaatcaagaaggagaagataacaacgaagaactttcaaaaattaatgaggaaagagaaggtacagaaaaaagcgattcagaattgcaggatgtagaagctcaagaacaaggtgagcaggatgatccatctgattatgaaactgaaaaccaagaaggaaacaatgaagaattggcaacggtgaatggaaatgatgaagaagaaaatccggagttgtccgatgtagaagatatagatcagcctgagcaggacgatccttctcaatacgaaaaccaagaaggggaagataataacgaagaactttcagaaattagagaggaaggagaaggggcaaaccaaaatgattcagaattgcaggatgtagaagctccagagcaaggtgagcaggatgacccatctaattatgaaacagaaaatcaagaagaaaataatgaagaattggcaacaatgaatgggaatgatggcgaagaagaaaatccggaattgtccgatgtagaagatataaagcagcctgagcaagatgatccttccgattacgaaacagaacaagatggagggaacggtgaagttttagtaacgactgaagaaactgaagtggattcagcacaaaataatgaaccgttatcagatgtagaaacaccagaacaagtagaacaagatgattcctctaattacgaagctggatatgaagaaggaaatgcaatggagttagcgacaacagaagaaagtactacagactcgcaaaaagagaatatggaagtgtcagatatagaaacaccagaacaggtagaacaagatgattcctctaattacgaagctggacatggagaaggaaacgcaatggagttagcgacgacagaagaaagtactacagactcgcaaaaagagaatatggaagtatcagatatagaaacaccaggacaccaggagcaagataacgtttcggaatatgaaactgaaaatggtgaaggagccttaaatcaaattgccagtgttggacagctgaactcttcagaaggaacttcaaattcaactggaaaatcaggtgagattgtaccatcattggatgaaaaacaaggggtagttaatccatctggtatagatcaggaaagtgggagtgaaaatgaatttgtattaaatgaaacgaatggaaaggaattgacttcaacaaaagggttggaggcaaaaagttcgacgaaaacggaaggttttaatttagagggaagtccaattggaaatggttcgacaaaagtatcgtcagttggtgaatttaatatagcgaagcctggtggaatgggtataaataatgaatcgatgaatgttaatgatatccaaggtgcatccgtcgaatcttcgggagacttgacgatgacaagcccggattcgctagaatcttccggttcgattcctggacaaactatgaatggaagtagtttaggagaacaagggataaaaggtcaaactatgaatggaaatagtttaggagaacaagaggtaaaaggtcaatcttttgaagggagccaagtcttgcaaagacaaggggcttcgcaagagattaggggagcggtggaagcgaagccgtcagaacatgtagagtcttcgcaagccgataaaataaatagaacaaatgaaacaacacatatagaatccgcacaagcagaagtagcagcatcgcaagaaattatgatagatgcgacacaacaaaaggtagagttagaaaccttagctgaagaaaatgaaataaaaatagaaacagaaacaatataaaaatatgtatttagttacaatgcctcgctagtttatagcggggcattttttgtaagggaggtacatgaagcgtggatttagagcacgaggatatagaggaaaaagaagccaaaaagaaagcgaaaataagtaaagtccgtaaactatggatggttagtggttgtttgtttagtagtgtttctctaattgtaattttctttgttttaataggaatcgtcttatttatgcttttaggtgatgaaaaaaaagaaccagtaagtggtgggggcgggttaataggtaatacaatttgccgcccaggggacaaacaattgaccgcagcggatttagacccacacttgaagggtgtgtttacatctaaggggcaagcttttattgatgcaggtacacaaaataatattgatccagtcttattaaccgctatagcgatgctagaaacaggtaacggtacaagtaatgctgtgaaaaaatataacaatccaggtggattaatgaaccccgcaagtactaacatgacaggctttattcagtttgcgacattagaagaaggtataaacggcatggctcgtaacttatacaaaaattatataggaatgggaattacaacaattgaagcaattggtgctaagtatgcaccgccgggcgcggcaaatgatccgcacggtacaaatggtttatggccagctttagttacaaagtttgctcagcagttaggtggacttacatttaactgtacaccagcagatagcggaggtgttgggaacgtgggtgatcctagctcgcatggatttgttttaccgattccaggaagtccacttgttaccagcccatatggtccgcgttggggcacgattcataaaggaacggattatgcgtgtacgcgaggacagacagcgattggcgcggcaaaagctggtcgagttggttttgcacagtttggagccagcggtagtggttttggtggatacggaaatgcagtggttctagaacatgaaggcggtttgtggacgttatatggtcatatggacgtactttctgtgcaacaggggcaaatggtccaagcggggcaacagctcggcgtatgtggggcgacagggcaagttactggcccgcatttacatttcgaaattaaaacatcatttaaatacggtcaggttgacccggcaccatatatgccgtaataagacctacggtaatatgtcaactaaaaaatataaacgtttaaagttatcaaagggcaatttgctaaaaaaagacatcacgaaactagaccagcattatatgtaaaataatggaatttattcaaaggtagcgatgacaaattttatgtcacactttcacgcccctttctggcgcaaagagttggtgactacgtagtagcgcatccaccaatcgcacaagttttcttgcggttagaacgagtgcacgtttgtgttgatgttttggtacttcattatatttttttacgtaatattcttgataatcagatacatgccttcttacagagttggcggcttcaactaagtaataccgcaagtaatgatttccattacgagataatgaagtgttttcagcagtgaagcgaccagactggtgtgtacgccaatataatccggcatattttgctatcttggtttcatcatcaaatctttcgatttgaccaatttcagcgataatacctgcggcgaatacaggaccaattccaggaatggattcgagtgtttgcgttaatccagccatgattcgcttaatggacttctctatttctttgatttgttgttgataggtacgaattaccgcaattgatgttccgagaaggacatcgattgagtcttccacgaccttatccaagcgataggaagagcgaacagccttttgaattgttgatgctacacattttgggtcaccaaatcggtttttccctttcatttgtaggaactcagcgagttcatctaaagacatgtcagctaactcttctagactgaatttttcaaggaacaattccatcatggcgttgccaaatatagaagaatccacctcttgtgaaaacgtattacatttataacttaggtgttggagaaaatgttgtttttcctttgtcaacattctaacgagctgataacgagatcttgttaattgctgaagtgccacatactggctttctttgacgatggacatttgattccgtccgaatcgtaagtaatcagcgatgacaaatgcatcaatctcatctgttttatccatgtcagaatagcttttcttgaagtttgcgatttgctttggattcataagaaataccttcgctccaaagcgttgtaagtcttcatcatagtgaagaaacatagatggatgaaaactataaacagatgtggattctaagccgattttaaaggttttaacctcttgattggctatacgctgcaataatcgctctttgattgctgtggcacctggcaagtcattattgaccgaaaaggaatccagcttttttccttcaccatttaaaatacaaacttttatatcaaacgaacttacatctagaccaacaaataatctcacgtaagagacctcctttcggtttagaatcattgcttggacgtctcgagatatctctagtgtgtacgccgaccaacaacctcgtgtatgagagcttgtcctgaatcgaaagccgccctagagctactatcatctaggttcgagggtcaggctgctcagcctgcgagtagggagtcccgcacgttcactgagaaacactcttaattatgtggtaagtccacaggagcggtaagaattgtcccaaatgatcctaagaccattatctagaaatatcttgagacgtccaagtattaatttacggatctcttattaagggaaattaaagctgaagtgacagcttaaacataatatacgaggaggaaatcaaatgaaacaaatattacaaattggcgcaattatcgcgttaagtattacaagcttgacactatggagtagtaattctgatttaaagggtgaggctaaacaacagaagacaaaacttacagctgaaataaaagaattgaagaatgtaaataaagaattagaagagcgtttgcaagttctaaaagaaaatacgcaagaaaaaggtcaggtagtggccagaaattttgtagaaactttaatgacgtatgacagtaatgataaggagaaaaaagggcttgaagcgttacggaaattagttaagggggaagcggaaaataaattgtttaatgctggtgaagattcacataagcaaattgatgatgcagccattcattacatgacaaaagcgaatgtgaaagatatgtactatacacgttcagctgaagacaaagcagatgttactgtcaattatgaatatgtaatttcaattgagggagagaagaaaaaagagaatcatagcatgaaattaagcttggtactagaaaatgaaaattggtttgtagaaaactatgatttcaaaatagagaatggaacagaagggccgtaaaagtacggaattaggaaagggttttaaaatgaaaaaatttaatttggcatataaagaggttcgagtatttgaagtgactgttgaagcgggaacggttgaagaggcaataaaaaagtttaatagaatgtcccatcaagatagggagagagtaaatcgaaacattacagttcaagaaagagagcaggaaaatgaaagctttaaataataattataaagttttactttgtatcatattaggtattgcttttaatgtatgggcttatgaaagacccttaattgaagcgatatttgctctagcatacttaatgctttttctatttatattatttgcaacatgctatttcatgttgtggagtaaggttaggaaaatgagatcagagcattgaataattaagtggattttatataagggctttaagagaatatatccaaaatatgaaggaggaagaggaaatgaatgaaaatatgtgtaaatgtcaagataaacatgtacattttcgcttgtttaagcatgtacaaaatcgaataacgttttttgacacttgggggtagtgcaaattcttaagttgatgggcatgtggccatgcccacataagggcacagtttactctttcccatctaataaacgaccaaggccacctaatacactaccttcgccagtactttgcgctgctgggcttgtaaggcgtgctgctaatcggctaagtgttaaggactgaatccaaactgttccaggtccttctaacgttgcgaagaataaaccttcgccgccaaatagagctgtttttacttttccaacgaactcgacatcatagttaatgtcttttgtcatagcaacgagacaacctgtatcaatgcgaagtttctcaccaggttttaattcacgtttatatacagttccacctgcgtgcatgaaagcaagaccgtcaccttcaagtttctgcatgatgaaaccttcaccgccgaagaaaccagttccgatttttttcgtaaactcgattccgatagaaacgccttttgcagcacaaagaaatgcatctttttgacaaactacttttccttgatattctgttaaatctacaggaataattttacccggataaggagcagcaaaggatacgtgacgcttaccgtgacctgtatttgtaaatacagtcataaacatgctttcgcctgtaacgagacgcttaccagcgcccattaattttccgaataaacctccagatgggccagaaccatcaccgaagattgtttccatttcgatgtaatcttccatcatcatcattgcgccagcttctgcgataacgctttcttctggatctaactcaatttcaacaaactgcatatcatcgccgtataatttatactcgatttcatgtgcttgcatttttttcacctcgtatgtaatagatacttatattgtacagaatttaataggattagaatactttagttttgttaattttcaaataaagtggaacaaaccaaaactgattatcagctcccgccaatcaagctgtccgcaaataccgggctaaaatatgaatatggaaattcaacattatattaaaattataaaaaaatggtggaatgaaagtgttctcatttgacgttttggatatagcgtgatatagtgaaatcactattgagctacataatgtggtacggaaataaagcacgttgaattaaaggctgtaagcttgttatacattcatgtcctttatatccaccttttcatgtggattcatagtttcatttttatttaggaggtacatgacatgcaaacaggtaaagttaaatggttcaacagcgaaaaaggtttcggtttcatcgaagttgaaggtggagacgatgtattcgttcacttctcagctatccaaggtgacggattcaaaactttagaagaaggtcaagaagtttctttcgaaatcgttgaaggtaaccgtggaccacaagctgctaacgttacaaaaaactaattagctagcgataaaaagcattccgattttcggaatgctttttttttattctttggaactcgactcatttgaagataattcgcccttaaaggtacgctcttcaaagtcatcaagcatttgctcatattcttcatgttcttccgtagcgaaaacttgcggattttttccatacatatctgtaccaataaagttttcgaaatcctctacgtagcctacgttttcttcactatttacgtacatgccattatagtttttcgaatcttgtctttctaaatcagatggtgtttcagatgttccgtaattagcaacatcttgccatgcatcttctgcatcatattcaacagaacgatcttcatcatgtttgtggaaagaaggagataacacttcttcttcgactggtcgtgtattcatatttagcttatttgtcgcgtgctggatgcatgttgtagcagtcggcattgcttctaatctttcaaatggaatttcttcgccagacacttcgcaaatgccgtacgtacccgcttctattttttgcaaggcatgtttcgtatccgctagctgtttatgccaaagttcaataagcccgaagtctttttcacgttcatatagctctgttgccatatcagctggatggttatcatagctagataattctccaacagactcacgttcagatgcacgatcttcattttcgtgtgtttgtatcgtttgctctagttcgtgtttttgtttttctaaaacggatttaaattgatttatttgttgtggagttaacatagtcgtccaccttcctacaattcagtttctttacatagtatgagcgttgcgagtaggaattatgagatgaatttcagatatgaaaaaggagccgcataagcagctccttttatagaaagtatccaagtaataatccgattcccatgaggagaccgaagatcgtatttgtttttgctgttgcaatcatcgcaggtaccatttccattggaatgcttttgccgataaagcctttcgtcgctttaaatgctttcggtgcacttaaaaatacgataagcatccatggtgatacgatgcccacgataattaaagcaattgtccaaatgtaggaaacgatgaacatagaagcaagtacaccaaccgctctttcacgtccaacgagaattgctaacgttttacgaccgttttctttatcgccatctaagtcacgaatattattagctagtaaaatggcaccaattaaaatggagcttggaatagatagtaaaatgacttctgatgttacagttccagtttgaataaagaatgaaattccaataatgataacacccataaataatccggctgttaactctccaaatggtgtataggcaatgggaagtgggccacccgtgtaaaggtaagcaacggccatacaaacaagaccgattgcagcaagccaccagctagaattcatacaaatataaacacctaatagtattgcgatgccgaaaaatccaaatgctaagttaagcactgtttttggctgaatgccatcgcgaacgatagcgccgccgataccaactgaaccttcgtgatcgagtcctcttttataatcaaagtattcattaaacatgtttgttgctgcctgaatgagaagacaagcaagaagcattataaggaaaagagggagatggatttgatttatacctccgacctgcattgcataggctgttccgatgaaaacaggaacgaaagctgctgttaatgtatggggacgtagtaaactccaccaaatgcgccagcctgtttgcttgcttggttttggcgccgtaggagaggaattcgtttcgacgttcatttccatgttgaatcctcctttggtcacatattgtacacaactaagtgtagaaaaagcatcatttagtgtcaacgtttattttctaggaagagaaggtgaatttctcagaaatgctaaacgttgacaggcctttcgtttgaggtgtatcttaaaatcaagcgtaattatgactatttttcgcccataggggggagacaattgtgattcaaacgaaacaaaaaggcttgcaagaagttcttagtgcagccattaagcatgcaactgatgaaaaaatattggttagttttgtaaaacaaatagactggatggatccgcttctgttttatgcagcaggaaaaaggattgcattggaaaatagatgttattttgcagatccagctcagcatgtaatatttgctggaattggctctgttttcactatagcaaattcttctcacaaacgctttcaagcggctcgtgacgagtgggataaagtaaaagagaaagcatttgtacaaagagaaaaatatgaatttggaacaggtcctcttttatttggtggattttcatttgaccaagaaaaagagaaaacggacttatggaaagaattcgatgatacgacattttcactaccagcatttttattaactgtaaaaaatgaaaaagcatggttaacgatgaatacattcgtttcagcaacagattgtgcagaaactctttataacgaaattgtttctttagaagagaaaatttttggggagagtaaatgtgcattagaaggattgaaattaacagttacttctaaagtggaagtggatccgaaaggctggatgaaagccattaagaaagtgcaagatgagatgaagcagggtaacgtgcagaaggttgtattagcgagggagctaaaagtagaaatggatcatcatattgattctgctcttgttttagaagcacttcgcattgggcaaccggattgttacgtattttcttttgattataaaggagcatgcttcttaggagcgacgccagagaggttaattcgtaaagaagatgagaagtttacttcgatgtgtcttgctggttcaactggtcatggtcaatctatagaagaaagtaagcgaaatagtaatgcgcttcttcatgatgaaaagaatttagctgaacacggttatgttgtgaacatgatcaggtcggtattaaatgagcactgcgaatacgttaatattccggagagtccaggtctattaacaacgaaaaacttaattcatttatatacgcctgtagaggcaaaaggcactgcgagtcttttaacgatggtagaagaattacatccaacaccagctcttggcgggacacctcgtttggaagcgatgaaactgattcgtgatgttgaattgttagacagaggattatatggtgcaccgattggctggatagatgatgaaggaaatggtgaatttgcggttgcacttcgctgcggattattaaatggcgagaaagcatccttatttgccggttgcgggattgtaattgattcagtaccgcaacttgaatatgaagagacaagtttgaagtttagaccgatgcttggtgctttggaggaattaatgaaatgaacaatcatatagaagcattatcatattatttaggcgcgttcgtggatgaactgacgcgtctaaatgtatgtgatgttgtcattagtccaggctcacggtcaacgccgattgctctactaatggaacaacacgaaggaatgaacacatatttacatgtagatgaaagatctgcaggattttttgcgctcggtatcgcaaaagcgaaaaaacgtccggttgcattattatgtacgtcaggaacggcagcagcgaactactatccagctgtatgtgaagctttccattcacgagtgccgcttatcgtcttaacagcagatagaccgcatgaattaagagatgtcggtgcaccacaagcgatgaatcaatttaatttatacggtacgtttgtgaagcaatttacagagatggcacttccagaagcgagtgaagcgatgtaccactacgctcgcatgacaacgcagcgcatgatagcaagtgcttgtttagcgccgcaaggacctgttcatcttaattttccagttcgtgaaccgcttatcccggacttttcattagaaagtttatgggataaaggacgcggggaatatacagaagtagttcagcaagggaacgtggtgatgccgagtgaatatgtagattctcttgtagggcgcctttcacatatggaaaaggggcttattatttgtggagatgatagtcattcagaaatcgcaacgtttgcaacgcaactagctgaaaaaacgggatacccaatattagcagacccactttctaatattcgtagcggacaccacgataaaacgatggtaatcgactgttatgatacatttttacgaaatgaattgttaaaagagacgtggaagccggacgttttaattcgttttggtggtatgcctgtttcgaaagcattaacgcagttcattaaaaaacaaacgaaagctgttcatatcgttgttgacgaatctggacaatggagagatccagctcttgttgcgacagaagttgtacaggcaagtgatattgcattttgcagtacattaatagaaaaaatgccagttatgaaaaagaatgattggtcccaaatgtggcaacatataaacgaaaaaacgaaggaaacgcttcgtgaaatggaaacatatgaaactgcatttgaaggaaaagtcattacagatattgtacgcgtattaccagaaggagcaacgttatttgcgagtaatagtatgccaattcgtgatacagattcattcttcttcacatcagataaaaatattcaagtgatggcaaaccgcggtgtaaatgggattgatggcatcatttcgacagctttaggagcgagcatgatttgcgatccgctcgtattagtcatcggtgacttatcattctatcacgatttaaatggactattagctgcaaaattacatgaattaaatataacgattgtcgttgtaaataatgatggtgggggtattttctcattcttaccacaatatgagaaaaaggaacacttcgaatcgttatttggaacgccgattgggcttgactatgagcatgttgttaaaatgtacggtggttcatttagccgtgtaaatggttgggagcaattccgggaggaagtacaaaagggagcaacgacagaaggtttacacgttgtagaaatttgtacgaaccgtgatgaaaacttaacgttgcaccgtacgttatgggcaaaaacacaggacgtaattactacatcattgcaaggtgaatcaaaatgaaagtaacgctgcaaggtgtatcgtatgaatatgaagtagtcggaagcggggaaccacttctacttcttcatggttttacgggaagcatggaaacgtggcgttcttttatctcttcatggagtgggcagtttcaagttattgtagtggatcttgttggacacggaaagaccgagagtcctgaagatgttgcgcattatgacattcgaaatgtggcattgcaaatgaaagaactattagattaccttcatattgaaaaagcacatatacttggctattcaatgggcggtagactggcgattacgatggcgtgtctatatccagaatatgtacgttctcttttattagaaaattgtacagctggactcaaaagtgaagatgagcgaaaagaacgctgtgaaaaagatgagcgacttgccgataaaattgagcgagaaggcatagaaagttttgtatcgatgtgggaaaatattccgctgtttgaaacgcaaaaacgtttagcaaaaaacgtacaagaagcggtgcgaaaagaacgacttgctaacaatccaaaaggacttgcaaatagcttgcgcggcatgggaacaggggctcagccttcatggtgggatgagctacacaacttgaaaatgcctgttcttttaatgaacggagagcatgatgaaaagttctttcgcatattaaaaaacatcgaaaaatgcgtctctgacgcgaaatttgtcaaaattgatggtgctggccatgcaattcatgtggaacaaccggaaaagtttgatacaatagtaaagggatttctaaaaactatgcagtgatgcttttttcagttaagaatgaagttacacttatagatgagatcagaaatatacaaggaggtagttgtaatggctattgaatgggtaaaagaaggcaattacgaagatattatttattcaacatacaatggtatcgcaaaaatttcgattaaccgtcctgaagtacataacgcattccgtccaaaaacggtaatggagttaatcgacgcttttgcacaagctcgtgatgatgcaaatgttggcgttatcattttaacaggtgaaggtggacgtgcattctgttctggcggcgaccaaaaagttcgtggtcatggtggatatgtaggtgacgaccaaatcccacgtctaaacgtattagacttacaacgtctaattcgtgcaattcctaaaccagttatcgcaatggtagcaggttatgcaatcggtggaggacacgtacttcatatcgtatgtgacttaacaatcgctgcagacaacgctgtattcggacaaacaggtcctaaagtaggaagctttgacggtggatacggagctggttacttagctcgtatggtaggccacaagaaagctcgcgaaatttggtacctatgccgtcaatacagtgctggggaagcgcttgatatgggcttagtaaatacagtagtaccattagaacaacttgaagcagaaacagtacaatgggcacaagagatcttagcaaacagcccaatggcacttcgtttcctaaaagctgcattcaacgcagacacagacggtctagctggtattcaacaactagctggagatgcaacgttattgtactacacaactgacgaagcaaaagaaggtcgcgacgcattcaaagaaaaacgcagtccggacttcggtcaattccctcgtttcccttgatcaaatcaaaagcggagccgactgtttagccccgttgactaaggttcttagacggaagcggctcgcccacaaagtgagtcgcaaccaaatgatcaaaccggaaacaaaacaactaagagacttgatgtcacatcaagtctctttctttcatgaaaggagaatgtatgatggagacgatgccaaattggttaaagcaacgtgcatttttaacaccagatcgtactgcaattgaaatagaggaaaaggaagttacttttatgcagctgcatgaaaaggtagtatctgtttgtgaacacctcacgcatgtaggagtgaagcgaggggaaaaggtggctgttctgatgaaaaatggtatggagatgattacagttattcacgccctatcgtacgtaggagcagtagctgtgcttttaaatacgcgtctttcaagagaagagctactttggcaaatggatgatgctgaagttatttgtttagtgaccgatcaagaatttgatgctaaagatgttcctgtctattcattcgccgaagtgatgaatggaccaaaagaggaagcctctatacaagaagaattctctttagaagaagcgatgacgattatttatacgtcagggacgacagggaaaccgaaaggcgttattttaacatatggaaatcactgggccagcgcggttggctcttcgcttaatttaggacttcgtgatgatgattgctggttagcgtgtatgccgatgttccatgttggcgggttatctcttctaatgaaaaatattatgtacggcatgcgcattttactcgttccgaaatatgatgctgattttattcatacagcacttcaaacgagaggcgtaacgattatttcagtcgtatcaaaaatgttaactgatttattagagagacttggagaagaaacatatccttcttctttacgatgtatgttacttggcggaggaccagcgccaaaaccgttactcgaaacatgtgtagataaaggaattcctgtgtatcaaacgtacggtatgacagaaacgtcttcgcaaatttgtacgttgtccgcagattacatgttaacgaaagtaggatcagctggaaagccactatttcagtgccaacttcgtattgaaaaagacggcgtagtagtgccgccacatgcggaaggcgaaattgtagtaaaagggccgaacgtaacaggcggttattttaaccgtgaagatgcgacgcgtgagacaattcaaaacggatggcttcatactggcgacctcggttatttagatgaagaaggatttttatacgtattagatcgccgcagtgatttaattatttctggcggagagaatatatatccggctcaaattgaagaagtgttgctgtcccatccagcgatagcggaagctggtgttgtaggtatgactgatgataaatggggacaagtacccgctgcttttgttgtgaaaagcggggcggtaacagaagaagaaattcttcacttttgcgaggagaaattagcgaaatataaagtgccgaagaaagcatgtttcttagaggaattaccacgtaacgcttcgaaaaaattgttaagacgagagttaagagaattagtggaggagaaagaaacagtaaacaaaaacatagacaaaagtaggcatatataataaaaagtaattatgaaacaatataaaccaaaagaattttcagaaatgcttaatgtctctgttaagacattgcaaaggtgggacaatcaaggtgttttaactgcttaccgaaaccaaaaaggaagatgatactatacagaagaacagtataaggaatatatgggtattcaagaagaaaataaagtaggcaaagtagttatttacacaagagtatcaaatccaggtcagaaagatgatttagaaaatcaggttgagtttttaaaaacattcgcaaatgcacgagggatgattgtagatgaagttatcaaagatattggtagcggattaaactacaaaagaaaacagtggaataacctgattgacagttgtatggaaagaaatatttcgactatcatcattgcacacaaagatagatttgtacgttttggatatgagtggtttgaaaagtttcttcgtaaaatgggagtggaaattatgattgttaacaatgaaaaactatctcctcaagaagaacttgtgcaggatttaatatctatcattcatgtatttagcggtagaatatatgggttgagaaaatacaaaaagaaaatgtcggaggatgaagatttatgaaaagagcatatttaatagaaatcaaaccgacaactgaacaagttagtaaaatccgtcaaactattggggtgtgtcgatatgtatataacctgtatatctctaaaaataaagaggcatatgagtcggatgggaaatttcttagtggctatgacttttctaaatggttaaacaacattcatacaaaagagtgtgaccagtggattaaagaagtgtcgagcaaagcggtaaaacaagcgattatgaatggagataaagcttttaagcgattttttaaaggtttatctaagtttccacgatataaaaaaagaagaagcaagatgtgaagtgctactttccgaaaaacaacaaaacagattggacagtagaaagacatagagtaaaagtccctacaattggttggataaggttaaaagagtatggatatatttcaaaaaatacaactgtaaaaagtggtacagtatatcaaagagcaggaagatactatgtgtctatactctgtgaagtgaaagaggtaaaaccaaattcaattctcaatgcagtaggtataggaattgatttgggaattaaagacttcgctgtacgtagcgatggaaaaactcacaaaaatataaataaaacagtacaagtaaaaaagatagaaaaacggttaaaacgtgaacaacgctctttatcacgcaaatttgaaaatataagaaagagaggtgaacaacctgttactaataaaagagcgaatataaacaaaaatattcttagggtgcaacagctacatgctaggctagcaaatattcgattagcgtatgtaaagtctattgtaaatgatgtggtgaaaaccaagccaatgtttattacagtagaagatttgaatgtgaaaggtatgatgaagaacaaacatctatctaaagctgtagcgcaaccatgtttttatgcttttaaaacatggttatcaacgaaatgtagggaatatggaattgaactacggcaagtggacagattctatccatcttctaaaatatgttcatgttgcggtcaaaaaaagtcggatttaaagctgtctgaccgagtatatacatgtgattgtggaaatgtaatggatagagatttaaatgcatctatcaaccttttacaagcaaaaaaatatacaatactaacgtaaatagattgtatatatgtacggtgggctacatcggaatttacgcctgtggagtgtcacagcaaactgtagtagcaagtgattagcgaggcagggcacgtagaagcaggaatactctaagaatatacatttgtctatatttttagtagcagatgtaggtggaaataaaaaaagcgacacttcatataacagaaatgccactcgtaatcccgtttgctgcaagctacgggacttacgaaaagcgtgagagtatcgttattgaattagaagatgaagatgggtacattggatttggcgaagtcgttgcgttctctgaaccgtggtatacggaagaaacggtgaagacggcgctgcatgtactgcaagactttttaatacctgatttattaaaggctgaaatttctcatccgaatgaggtaccgggtctatttcaacatataaaaagaaaccgaatggcaaaggccggaattgaaggggctgtttgggatttatatgcgaagtgtcaaaagaaatcgttagcgacagtgcttggcggaacgaagtctgaaattgaagtcggcgttgtaattgggatcaatacgattccggttatgttaaaacaaatcgagaagtacgcagaagaaggatacgagcgttttaaagtgaaaataaagccagagcatgattacgaattattgaaagagattcgaaaagagtttccgcatatcccgctaatggcagatgcaaattcagcatatacattaggggatacggagaggctgaaacgactagatgaattccaattaatgatgattgaacaaccgttagccgattatgattttcttgatcacgcggagttgcaaaagaaaattgaaacgccgatttgtttagatgaaagtattcatagtttagaagatgcacgcgttgcgattacccttggtagctgccaaattgtgaacgttaaaccagggcgagtgggcggattaacagaatcggttcaaatccataattattgcatggagcacaacatacccgtttggtgcggcggtatggtggagatggggatttcaagagcacaaaatgttgcgcttgcctcattgccgaactttacgattccaggcgatatatctgcttctagcagacattgggagcaggatattatttcgccggaagtgacgcttaagggcggaaaagttatggtgccgcaaagtgttgaagctgagtatgaagtagaccgcggaaggttggcggagatcacgaaacagcgaattgttttggagcggtaacttgagtctttaaagtagcgggcgaatttcgttgttaattgtcggtaagtcgatatatttcaataatcgctgatataatgcgagttacggtcgatataattgagaaatcgccgatataattcaagttatggtcgatatatttggaaaatcgctgatataattttatttacaaaggttactctaacgggtaaccttttcgtattgtacaaattggatagactagtttacaatcgagcgtataaaagggggagtaaaatgaagcgcatttcaattttaatagtggatgatgaggcagaaattgctgatttaattgagatacatttagaaaaagaagggtaccacgtcgtgaaggcagcagacggggaagaggctgttcatattattgaaacgcagccaatcgacttagtggttttagatattatgatgccgaaaatggatgggtatgaagtgacgcgtcaaattcgcgcgaagcaccatatgccaatcattttcttaagtgcgaaaacgtctgattttgataaggtgacaggtcttgtattaggtgcagatgattatatgacgaaaccttttacaccgattgaattagttgcgcgtgtaaatgcacaattacgtaggtttcttacattaaatcagccgaaagtagcggggaataaatctgctttagaggtaggcggagttattattgatcctgagcaaagaacagtgaacgtctatggagagcaaattgagttaacgccgaaagagtttgatattttatatttattagcgagccatccgaagaaagtgtataatgtggaaaatatttttcagcaagtatgggcagatgattattatgaaggcggaaatacagttatggtacatattcgtacgttgcggaaaaagcttggggaagataaaagaaaagataagctaataaaaacagtgtggggagtagggtatactttcaatggctaatatgatgaaaagttttcgatttaaaatgattgccttatttgcgttaagtatggtgcttgcagcaactgtaacttatataatttataaaggattgcagctgtattataaaacgatggttcgctatgaagagcctttagcgcaatttaggtcagtggtaagggaagttggagacattaacttctttttaattttctttattccgttatctattatctttttcttctttttgacaaaaccgtatttaaagtattttagtgagatttctaacgggattcatcatcttgcgaacggtaactttacgaataaagttcaagtttcatcaaacgatgagtttggagatatcgcacgtgaaataaatgttgcgagtgaaaagttaaaagaagcggtggaaagaggagactttgctgaaagtagtaaagatcagctcgttgtaaacttagctcatgatttaagaactccattaacatccgtgttagggtatttagatttaattcttaaagatgagaatttaacaaaagaacaaattaaacatttctccacaattgcatatacgaaatcgcaaaggctcgaaagtttaattgatgagttatttgaaattacacgtatgaattatggcatgctaaagctagataaaaagccgattgatataagtgaactacttatacagttagatgaggaattgtatcctttattagagaaacatcatttacaagctaggttgaatattgatcctcatttgccaattaacggtgatggaaaattgttagctagagtatttgaaaacttgttaacaaatgccgttcgatacggatatgatgggcaatttgttgatctgaatgggtatatcgataatggagaagttgtcgtacaagttatgaattatggagacagcattccagaagaagatttaccgtatctttttgatatgttttatacaggtgataaatcgagaactgagaaccgtggcgggacaggccttggactgtttattgcgaaaaatattgttgagcagcataacggtacaatttctgctgaaagtaatgtagttagaacaatgtttgaagtgcgattgccaaaagacgagaacttaacaatttaataaaaatttaaactttaccccactttttattttaatagttttttctattctatacgtaagttacgttaaggaggaactagaaatgaaaaagtgggtatttatttctttttttatagcatgcacagtatgtgtaggcttttatatatcaccgttatttcaaaaggaaatcgatgttaaaattgtcggaaaagatgagctagtaaaggcggcaaataccgagaggaaagagattacgaaggaacaaatttataagggtgatttattattagttaatagggattatccagtaaaaaaagatagtattaggtctgatattataaatgtaaatcataatagtgaattagtaagaggctacgtaatatttgatagaaatcttcgtttatcaaagtatgttgtaaaaaagtttttgaacgttgtcgatgcggctggaaaagatggcgtacagcatttcttaatgagtagtgggtatcgagattttaaagaacaaagtaaattatataaagaaatgggatctgattacgcgcttccagcaggatatagtgaacataatttaggattatcactagacgttggatcaacgcaaaagaagatggagaaagcgcctgaaggaaaatggatcgaagagaacgtatggaagcatggctttgtattacgttatccgaaaaataaaagtaacattactggaattcaatatgagccatggcatatccgttatgttggcctacctcatagcgcaattatgcaaaaaaagaatttcacactagaggaatatttagagtttttaaaagaggaaaaagaggtttcaactgaagtagaaggtaagaaatatactgtttcttattataaagtttctgagaatacgaaagtgaacgttccagcaaacaagcagtatgaaatttccgggaacaatatggatggggttattgtgacggttcaggaatagagaaaaaaggctgtgccatttgggacagccttttcttatataagaaaggaattgaagtttttttgtcggtaaatcgatattccttgtcgaatcgttgatatattgtaagttatgatagatataattgaaaaatcgttgatataatttcctatactattaccattttggaggagcatctttttattcactttcaaacattataacgttatatttacttctccctttttttgtgttacgctaaacgtgtgaaagacatataaaatgaaactttaatgtaagcgtattcttatggcttcttatagaaaagggtggaagtacaatgacagaacgattcgtactacgtaatgtaaaacgtgtgaacggggaagagattgacattgtaattgaaaataataaaatcgcacaggtgacgaaagctggtgctggcgagggtggaaaggttcttgattactctggtacttacgtatcgagtggttggattgatttacatgttcatgcttttccggagtttgatccgtatggcgatgaggtggatgaaattggcgttaagcaaggggtaacgacaattgttgatgcgggtagctgcggtgctgatcgtattgcagatttagtaaaaagtagagagcaggtaaaaacgaatttatttgcctttttaaatatttctcgtatcggtttgaaacgaatcgatgaattatccaatatggaatggatagataaagagaaagtaatagaagcagtagaaaagtataaagatgtaatcgttgggttaaaggcgagaatgagtaaaagtgtcgtttgtgatagcggaattgaaccgcttcatgttgcacgctctttatctcgtgaaacatcattaccaattatggtacatatcggttcagcgcctcctcgcattgaggaagttgtacctcttttagaaaaagatgatgtcattacacattacttaaacgggaaagaaaataatttattcgatgaagaaggcaaaccgctacctgtattactagatgcagtgaatcgtggtgttcatttagatgttggtcacggtaatgctagtttttcttttaaagtagcagaggcggcgaagcatcacggtattgcttttaatacaattagtacagatatttaccggaagaatcgtatacacggtcccgtgtatagtatggctcacgttctttcgaaattcctttacttaggttatccgctagaagaagtaattgacgcggttacgaaaaatgcagcagagtggctgaaaaaaccagagcttggccgcattcaagaaggagatattgcaaacttaactttatttacagtgaaagatgagaaggttacgttaattgattcagaaggggatcagcacattgctgaaagaaggattgatacgaaaggggttgtaatcaatgggtcattcattgaatgctaagtacggattaaaaagagtaattaatgcgagcggtagaatgagtattttaggtgtatccgctcctacagatacagttatggatgcgatgaaacatggtggacaaaattatgtggaaattgctgatttagtagataaagcgggagaccatattgcgagaattctagattcagaggcagcggtcgttgtgaactcagcatcgagtggcattgcgctttctatcgctggtatcgtgacggaaggaaatcgccgtaaaagtgaaagacttcatcaagaagtaatcgcgaaaaacgaagtaattatgttaaaaggtcataacgttcaatacggtgctccagttgaaacgatgatttatttaggcggcggtaagcttgttgaagtgggttacgcaaatgaagggaaagcagagcatattgaagatgcaattggtgaaaatacagcagcgattctgtatgtgaaatcacatcatgcagtgcaaaaaaatatgatttctgttgaagaagcatgggaagtagcgcagcgaaataacgtaccacttatcgttgatgcggcagctgaagaagacattcaaaaatatgtgaagtattcagaccttgccatttatagtggttcaaaggcaattgaaggacctacttctggtattgttggcggtaaacgaaaatatatcgaatggctgaaagtgcaattacattgcatcggaagaagtatgaaagttgggaaagaaacaactttcgccttacttcaagcgcttgatgagtacggcgtaaaagaagataaaagtgagcaagaaaaagaattgctacaagtacttatgccgctaaaagaattaaaaggtgtaaatgtaacgatcgttcaagatgaagctggaagagcaatctttagagcacgtattcatattagcgaaaaagagttaaataaatcggcaaaagacgttgtgacagcattacgcgaaggggaaatcgcaatctatacacgtgattacggagtaagacaaggattctttgatattgatccacgtccacttcaaggtgatgacatacatgtaattgaagaaaaattgagagaaattgtagggggaaactaaaatgacaaatattcaaaaacgtttttataaaggccgcgtagcattaaatgtattagcgaacaatacccgaaatgcgaaagatatttttgaagcagcagaagggtatgtagtagtgggggtattatcaaaagactacccaacagtagaagaagccgttacagcaatgaaagcatacggaaaagaaattgatgacgctgtatcaatcggactaggagcaggagataatcgccaagcggcagttgtagctgaaattgcgaagcattatcctggcagccatattaaccaagtgttcccttcagttggagcgacacgtgcaaatcttggcgaaaaagatagctggattaatagtttagtatccccaacaggaaaagtgggttacgtaaatatttctactggtccaattagcgcagctggagaagaaaaagcaatcgttccaattaaaacagcaattgcacttgtacgtgatatgggcggaaattcattgaaatacttcccaatgaaaggtttagctcatgaggaagaatatcgcgcagttgcgaaggcttgtgcagaagaaggatttgcattagagccaacaggcggaattgataaagaaaacttcgaaacaattgtacgtattgcgcttgaagcaaacgtagagcaagttatcccgcacgtgtactcttctattattgataaagaaactggtaacacgaaagtagaagatgttcgtgaattattagcagtcgtgaagaagctagttgatcaatatgcgtaagaaaattgcagcgtttggcgaagtaatgatgcgcatgcaagtacctggatatgaattgttgtcgcaagctaacacgttaaattactcattttcaggtacaggtgtgaacgttgcagcggcactttctcacttagggcatgaagggcttcttatttcaactttaccggaaaattcggttggagaggcagctgtatcttacattcaaaagttagggattcaaacttctcttgtttcaagaggcggtaaatatgtaggtatgtattttttagaaaatggattcggtgcacgtgcaagccgcgttacgtattcgaatcgactagaaagtagcttcaatacggcgtctgaagagatgtaccaatttgaagaaattgctaaggaaattgatatcgttcatttttgcggtattacacttgcgatgaatgatacggtgcgccatcatatgaagtctttagcgagagcagttaaagaaaacggaggaaccgtcgtttttgattgtaattatcgtccatcactttggggagaagacggatatgaacaggcaaaaccgcattatgaagaaatgctgggacttgctgatatcgttatgatgaacgaaaaagatgcaatgttcgttcttggaatgaaaacagaagagacagagcgagaggcgcaacttgttgatcttattccaaaggttgctgaaacatatcatatcgctacaatcgctggtacacatcgctctattaatagtgataatacacactcgctacgcgggtttatatgtaaagatggtgcgttcacttttgcaaaaacacttgcgttttctgtatatgatagaataggtgctggagatgcttatacgagcgggattattcatggcgagatagaagagtttgcaccagagaaagctgtttcatttgcgtcagcagctggaatgcttgcacatacaatcgtcggtgatacgcccatgtcatcagagaaggatatacttcgggcaatgacggcatcagtaggtgatgtagaaaggtagtgggtgtaacggtgaacgtaacgaggaaaaaaggaccattatatttacaaataaaaaatattattcgtgatcgaatattgcatggtgtatatgcgattcatacgaatattccttctgaaccgcagttagaagaagagttcaaagtgagcaaaattacagtgcgtaatgcaattaaagaactcgctcaagaaggatatttagaaaagaaaagcggtaaaggaacgaaagttatccgtaatacttctgcgacaaagttgtcaaaaggtaagaaatttacagaagtgttagtggaagaaggatataaagtacaaaagaaattgctaaaagcagaaatcgttcataatgaagaaggaacggtgccatttcgattattcggcaaggagagttttcgtattgaacgtttatatacgttaaatgatgcaccttacattcattatacgcactatttctcagcaggaatggcaagtacagatttatcggactttgacttgcaatcgctttatgatttagttgaagaccgaggcattcacttagaaaacttcagagatgaattcgctgttggactcgcgcctagtttcgttgcagaagcgctaggtgaaaaagaggggacagcgttattaaaacgtatgcgctattcttatgatgaagttggcgaagtaattgaatatagcgaaggctactacaatacagaaatgcagtattatgtagtgaattatgacgtataaaaaagaggggatgttggtcatctccctgtcaagtagacagaaataaaaagagtattatgccacggccttttcccgatattctatcggggaaaggccgtgtggagtgggggaaaaggtagagataacttcaaatccttacctatcactaacagtcacaaggttgggcaatgaatacaatttctaacccgaaagattctatttactacggtgttatgcatttaaaaggcgcatttgatgatgcgaaaatgctagggattaatgatttgttagccattgtacaaacatacaactttggtcgtaattatgtgcattggttagcgacaaatagtaaaacgcattctttacaaacggctgattattattctttaacagttgttgcacctgctggtggtaataggaatggaacaacaattggatacagtcaacctgtagcaattgcttacaacggtggttatcgctatatcaatggcggtaacttttattatgcagaaatggtgaaacaatatttaagttttaataacgggactgcaccagtaaacggatcagaaacctttaagaaaataatggaggaagctttgaaatataacggaaacccgtatgtttggggcgggaaaactcctgcacagggatttgattgtagtggattaacctcttgggcatttagagcagcaggagtcaatttaaatggttcagcatcagaacaatactatgcaactgtagaagttgatccgaaagatgcacaaccaggcgatttagttttctttaaagggacatacggtgggcccgatcatgtaagtcatgtagggatatatgttgatgctaatacaatgtatgattctgaaagttcagggatagggtatcaccaatttacatcaccaggatggcaaaagtactatgcaggaattagaagagtagttccaaaataaaaaaagaaatgggtgcaaaataaatgaataatatatcaaagattttaggtgtagtgttgattttatcactggcttttaacggaatactgagttatagcacaaagaaagaatttgaaaagaaggataaaaaacatcatgtgactgtagcggaaaaagagaagcaaatcggagatttaaaagtgaagttggagcaggaaagtaaaaaaataaatgagggtgcagcggacgaaaataaaaaagaaagtaatccaacagtagatttacaaaacaaatacagagaagttgcaaatcaattcgtacatgcttatttagattattcggtacaaaataaaggcgaaagacgaaacaacttgttaaaaataacggacaaaaaggtagtagatgtagtagcacctaatacagatgatttaggcgatccaaacttcaaatcacatgtaaataaggctgcaatatacattaattcagaaggtgatatttctaagaaatgtacggctttacttgatgtggagtacacaattgagggattagaaaataaaaaaacaacgattaacagtgttgtaaagataacgctagaaaagcaaggggaagaaattaaagttgtagagtataatccgtatccagcgaaacgatgaatagaaaatgatgtaaacgaaaagccccttactaactagtatggggcttttcgtttaacaaataaatctaacaggaaggagtaacatcatgcttttgagtgaactaaaacccaatcatgattatgtaaaagaaggtaggtatttaattttaagtctacgaaaaaagaaggggattcgaaaagataagtttattgaaatcccgataacatggtttgattataactttggggaaaaagtggaatggctcattgtacgtgaatatcagtctagtgttaatgggaaagaaaagtatacaaattataaacttgaaaacattcacgctcacgtgagcgtagtaaatgtgaaaggagaaacaacaaaatgaattttaattttggaatgaataaggaaggtagaaagcctgcaaatacaaaaaggaaggcgtatttatatactttaggaagttttttcacagtgttttttgtactttgtatttctcctgtttttagtggagcgacatataaatttgaagaaatgaaaataggtgagtatcagagtttgtccaccacggtaaagatttcagttgcaaaaaaagaatacaatccagtcaatcaaacgttacgaattgattatgagttaagggcagataatgactctcaaattctaagtaatatgaaatacaaagtagagaataaatacattaaacaaaaagataataacgtgaaaacgaaggtttatcgggcaagtgataactacattgtggtaattagtgaaaatgttcctgaagaatttggtgttgtatcttcggttgtgaagcctgaatatattcatcctgaattgcaaacggacgtggatgatctaaaggaacggagcttgaaaacgtacgttttagaaaatgaaaaattgattaataaagaattgaaaaaggaatcgaaagatttctatgaaaaagagtatcttgcattttcgcaacagggattgagaaaagaaatgaaagaaatagagaagaaaattgatgataaagcttcagctatgaagcaattaaaaatcaaaaatgaaaagttaacaaaagaaatggagtaccaaacagagggcgaaaaagtgaaaaccaaaaacacaataaattcaaatgagtctaccattaacaaccatcaaaaagaaattgatgtattaaaagaagacatcaaaatgaaagaaaagaaaattaaattgctgagtgaaaagaaaaaaacgatataaaaaatagtgtttttgagtgaccactaagtgaccactgagtgccacgaaatgaccactatccttaaaatatgaccactgagcgaccactcggagaggattagtgatatcaatttgagtgaagtagaaacctaataggcacagcctatttaagcgctttgtttacaaagtgatatcaggtttccttatgctcttttttaatcactgtctttagttcttaactagaaaggaggaaatacgactattctagttatgcatttatcagaaaggaagtaataacatggacatcttgttaagaggtattgatcctaaatatataaaagatattgataagaggtgtgaattaataagtgtgaaattgaagagaaagtatactcgtgcagaatacttgagaagtctcattcaaaacgatgtagaacattctttgcttcagtttaagcaagataaatttgatgaagcagtcggcaatgttaccgtgtcattagaaagacaagagaataagttacaagagtatatagatgcaactaatgaattaataatgaaattagctactcgtaattaaagacaggagagagaatatgagtgaagtggttttgtctgatacagcaaagtttaagattactagaattcataatgatattgtggaggaatacttgcaacagcatcctgagtataaaactaaagcggatgtgtttagacgtgcaattgggttgttagatgaagatatgaggaaggaaaaaggcgaggatgatgtatcacttttgaaaaaagaagtgaaaggtttaacgcaagccgttaatacaatgaaacaacaaatggatatattaattaagttaaacatggaacttattgcacgatcaggaagcgatttaagtttagaagaattggagcaggaagttaaaagtgaaattgcttctgctgttacaaagaaatcggaagggaagttctctcgaactgttaaacgtgaacctatagaagtaaacatgcaagagcaggaacacatacagagagaagttaaaacaccatcttttgcaaagaaaacattaccgatgattacggatgatgtacaaattgtcatgaaaaaaggtaaaccacataaggcaatttctagattaggacagaccatgtatgaggaaattgagtgggaacaaatccccgaacatagacgaaaagaattaacataacttgaaggagaatgatgtatgggaaaatcaccaagtatcatattaacatctcaatataccattccaaaccaaaagagttttacaacgtatgtagattattgcatgagacaaaaagcacttttaaaagagagacataccttaacaaatacagaactaaccgaactgagtcgattgcaaaatgcaattgactcttttgatatggagaggggaagtcctcattctaatcaaaagaaagtgagtgtatctgaaaaagaagcagaagcaaaagtgcttttaacttctccaaacagttttaatactacgactgattttgaaaagtatgttagctatatgggaagaaaatatgcgctagaaagcaaaaagaaaatgactaaaacggaagaagaagaggtgttattacttaataaacatatagaagatttgtctcctgaacaaatgcaggagaagataaaagcagaagaaattttgtcgggtgttttctcgaaaaataaaaatgtaattacctccaatgatttaaatgaaataaaagagttggtgggaaaagcacaaaataaaggttcggtttattatcaagatgttatctcattcgatacggactttctaatagaacagaaactatatgatcctgtaacggacgtgttagatgaaaatcggattcgaaatgcaagtcataaaatgatggaacagttattcaaggatgaacaaattgaagagaataacggcttttggtttgcatctattcatcggaatacagaacacattcacattcactacggaacagtagaaaaagaaaatagaaggaagctagtcgaagttaaagtggatggagaaactttttacgaaccaaaaggaaaaagaaaacaaagtacactagatcatatgaaaacaacttttgcgaactctctcgtagatcgtacaagtgagttgagtcgaatatctaatctaagaaataacttagtgcaagaagtcaaaaaggagtatctacaatcaaaagaaaagcaaccaagtagggaagttactttgttacaagagatatacaacgggttacctagtaacaaaaaagattggacatatggcagcaaaagaatgccgaatgaaacaagaaataagattgatgaactgacaggattgttaatgaaagaaaatcctatttttaaggaatatcaggaagctgtagaaaaagaatctagttttcagaagggtttatatggagaatcggaacgggaagaaaaagattacgcaaagaatcaaatgaaagatatgcagaagcgtatgggtaattccttactaaaagaactgaagaaaaagcaaccatatgaggacaatccgttgtatcagtttcagcaaaagaatgaacagattaaaaagaaatatgaaagggggcggttagaaaaaagaagagagtacactacatattctcaatacaaaccgccattaattcgaaaaaaggatgtccgaaatattgaagcggcgttgaatgatgatttaacaaaatggcgtgcagaacaagagtatgagcgtgtacaggaacgaattgcacgacaacaagaaatggattattaatttaaaaggaggatttaaagtggagaaaaaagtgtattattccatcgtttcaagtacaagatttagccgtaatgaagaaaatagaaccattatagaagagaatataaagaaaggagaaaatcattttctaattcggaacgatgattatggtgagtgttttgaggtggattttgagaagcagataactgaagaagaaaatgaaaactggatactggaaacggttattggttttgctgaaaaatataaaattacagaatttgagttgtggaaaaaatttgagggtgattctacatatgataaaggatttggaatagtgatagtgggttcaatggataatccaatgctaaaatttaaagaagtatactcgggttcgttagagaattggaatataagttgggacaaaggaaaacaaacttacgaaaaaatatacttcaaattagcgttgtaataatagaaaggtagtgtgtaatatgtttcaaaataatttttatatgattgatcatgttgaccaagtaaagaatgaggttcatctaagtaaatatttatttaataagcaagttatcgtaaaagtttctgaagaagaagcggcagcctatgtcgagtttatgcaaggagcagcggaacatgatagtttaccatttgttaaatatgatgaagaaagagggttaatttgcgaatgacctacacaaaaaagaaatatacacctaagacaaaagagcaaattaaagaagaaacacaagaaatcatggacaaggtttttaccgatattacgaagtactatgaatccactgaagacatgattgagttggctggattcatggcgaagtttagtaactattctcctagaaacatgcagttaattaaatcacaatttccacatgcgtatgcttgtgcgagctttaaaacatttaaagatgcaggattccatgtaaataagggtgaaaaagcaatgaaggtttttcatccttatgtaaaagaatttgtaagagatcaaaaaacaaaattagcaattccactaactaaattaactgcggaacaaaagcaacaagtgaaaactggtgagttaaaagtggagaagcaaacaaattattatttgaaagcaacagcctttgatgtttcacaaacaaatgcaagacctgaagacttgcctaaaatattcccgaatcgtcagtttaattttgaggtgacagaggaaaacaaagagttattaaagacaggtatagaggcattagcagaaaaagaaaagattgaaattaaaatgatgggcaatcaaggcgcattaattaatgaattaggtaatgctcatggtatgcatttacaagctgttgacggttctcattccgaaatagttatgaatactcgaaacaccgaaacaaaagaattagctgtatctatacatgaattagcacatgcgaagttacataatgtgaaggtggatcattcagaacacacacctacaaaagagtttgaagcagaattaacttcttatatagtgtgtaagcattacggcatggatacgagtgaatttgccattccttatatagcccaatggacgaaaaacggacaggatatagaagagaaagacaaatctattatgcgtgttcacgaaaccgcaagtagctttataaatacaattgataagaaaatttctgaattgcaaagagagaacgaaaagaatagggaacaagataatggagatataaaaggtcaatctaattctgaagaacaacagaataaggttgaccattttttatctaataaaacagaaaaagatgtagatgcagccgctataaaacagcaagaaacaagaaggattgcacgtatggcatatatgcaacaaatggagaggtaagaggacatcttaataggtgttctttttaattttaactaataaggagaagagaaaacgatgatgttttatgatgatatgggaataagtacggaagaaacaaggcaatttatggggatggtgcttgaagacttagaacattattatcattcaaaggaaggggttttggaattagctgagtttatgtctagatttagtaattattcgggtagaaatatgcaagtgattaaatcgcaattccctgatgcgtatgcatgtgcaaatttgaaaacttacaacaaggctggcttttctttgaaaaatggagaacaggaaatgaaggtttttcatcctcttatcaaagaatatgtaagagatcccaaaacaaaaaaagaagttcttgtaaaagatttgacagtagatcagaagggacaggttaagaaaggcgatttaaaaataaagaaagacataacttactatttaaagaaatcggcattagatatttcacaaaccaatgctactagtgacgacttgaaaaagatattcccgaatcgtcaatttgattttgaggtatcagaagaaaataaaaacatgttgatttctggaatccatgttgtagctgagaaagaaaaaattgaaagtaaagcacttgatgaaaatgaaaacaccttagaaataaagcaaatacctgaagtcatctatgaattgattcgtgaaaaattgcaaggtgaaaaaggaaaagggagtaaagatgaagtggcgggagattttgaaacacgaatggctacacatattgtttgtacacattacgggatggatacgagtgaaaatacagtaccttatattagtaaatgggttgaaagtgatcaagatttaaaagaaaaagattcttctataataaacattcacgatacagcaagaacgtttattaatgtaatagatcaggaaatctctgaattacaaagggggacagaaaaagaactacagaaacacaatccagtaatcagtaacgatacaaaagaattaaacgaaaaagatgcagtaaatgatgaaaaggagcaaaagaaattcgaatttcctgcttttcaacaaagagtccttaaacgtatacaagaaaaagcggaacaaaatgttgctgaaaacattgggttaaatttagggagtcattggaatgctgtctctcaacgggcagagctaaattcaaaaaatcgatggaatgattataaaattaatctttctgaagatggaaaatatatagaggatattcagccgaatatgattttgagtttgggtgaattaaatacaatcgtcaataaatttggaactgaaaaagaagtagagaatttgaaaatcgtaacagaagaaatgaaaccacattatgaagctgactcaaaagaaacagagttatttaatacacatgttgctaaagtatcggtagatcaagataaaaacatgaaggttgaatgtatttctgaatatgtatcagacagtgacattgaatttgattttaaccactctgtagctgaagcgattgatagtattaattcttctattacaaaagcgcacaaagaagtaatgagcgaagaaattgaacgtcaaggaagtaatcaagaattgagtacaggacaacaagatgaagaagcagccgttatgaaaaagcaagaagctagaaaaatagcacgtatggcatacatgcaacagatggagagataaaaggacaccttaataggtgttcttttttattttaaatttcaactaataaggagagagaaaaatgatggataaccataaagtagtaacaggcattcaacaaaaagcagctctagagattgacgagaaagtaggtattgatttagaaaagcattgggaaaattacgaaattcaactgtccgaagacaatcgagtaatcgaagaaattcatcctgatatgcgtttgagtttaggagaaatgctatctgttgtaaatagatgtggaacggaaaaagaaatggaaaacttcaatcaaattgcagattaccttgaaccgtattatgaagctgaacttattcaaggagaattctatgatacgccaattgctaaagtttcaacagatagacaacaaaatatgaaagtggagtgcctatctgaatatgtatcagacagtgacattgaatttgattttaaccattctgtatttgaagctgttaaacatatcaatcattcaattactaaatcacacaaagaaattatgaatggtgatgtggagtatcaagggctttatccagtaaatgaagatatggttatttactgtgaatcgacagggaaaccattgcagcaggatgaagcggcttatcactttgagggctatggatatgtagtagcagaagaggtgattcctgaagagatagagggaaaagatgcttattatacaacaatcggctacgaagatgttgaagaaaaacgacttgctcctcttagatatatggaagaaaagaagattgaagatggagaactttgtttcaatccagtagaagagatcgtaaatgatcgaaaaagcgaaacagaggaagtttttcaaatggaatccgctaaaacagtcgggtcggtgaagaaagagcatggcgctatagaggtacaagaatcaaaaaccatccctgaagttggaaagcgatatgttgggaaagataccgtccatgaggaagaacaacagcaaatatcgcaaacaagagagcaagcaagaaaacattatatgatgaaacacatgcttggtcgggattattaatataagaaagtgggataaccaatgaagtataaaacgcatcttacaacaagcctagcggtcgccctgcctgtcttggcatcaacgggaaacctcacgattggaaatgtgatagcggttagttttggggctttgttgcctgatatagatgaacaacattcatggattggcaggagaactcgtggagtatcggacttaatgaatatggtatttggtcatagaggaatcactcattcactatttggtttagtgcttgtgttgattcctattttatttgcagtcgggatgacaccattgacctttacgaatggcatgtgcatccttgcaggatactttctacatctagtggaagacagtttctctaaaaaaggtattaagtggctgctgccattatccaatagaaatttccaaagtggattccatattttttactacagctataacggtatagcggaaaaaatgattttaatgattagtacgattgtagttgtgtatgagttgtattcatatggaatggcaagtttccaatttggggcttcaggcattttagaatcctttaaagcgttatttagttaaagcagaacaaatacaaatataaataaatcgaaaatgaccatgtgaaaatgcatggtctttatttattggaggaattgctatggaacaacaaaagaagaataccaaaagatataccgaggaagaaattgaaaaggcagcatcacttgatattgtggattattgtatgcaaaacgatatccctgtaaagtctgacagtgaacgttattaccgtttagcggaacacgatagcttaatcattgataggaagaaaaatcagttctactggaacagtagaggggttaacgggaatattatcaagtttgtacaggaggtagaagatgcttcgttccctggggcgatgcagcgattactggacggagaacaggactatgaaaaagcttcagaggttacatttgtgagtgagccttatgattgtgaacattttgcggaaaaagaagtacctcaattcgatagagcaagggaatatctgactgaggaaagaaagattgatccgcaagttgtagatgcattgcataaaaaaggactgattaaacaagataagtacaacaatgtattgttcctatggaaagaccgtgaaacgggagcggtaatgggtggatcagagcaaggagtcgtaaaatcggataaatacaaacgtggggcgtggaaaagtatccaaaaaaattctacggctaactacggttttaatgtattgcagggcgaaccccgaaatctaaagttctttgagtcctctattgatttactaagctacgtatcactacataaacatgaccttaaagatacgcatttagttagtatggaagggctgaaaccacaagtagtatttaattactatatgaagagtcaagagcggattggtgatgttcctgacagtctttcattatgcgttgacaatgacaaagcaggtaaagcttttgcggaacgattgatacattttcgctatgaaaagaatgatggaagcatagttgcatttaagccggaatatccgcaagcaccgtctaaagaacaaaaatgggattggaacgatgaatgcaagcgagtagccaatcaacgagaacaaggaagacgtacagcttatttacaacaaatgggcagagagagataaataatcgaaatgtaattttaaaatgtgtgaaatgaagttgaaaatgttgatttttattagtaaaccgcatataataaaggtacaaaattagagtaaccttactttagtaggtgcgaaaaaattggtgtaactctaccgtagtgagtaccaaaaaattggtgtagccttaccgtagtaggcgctaaaaaagaattttaaaagtagggagagttttcttcctactttttttgtttctagggggagaagaaagttggctaataaagataatcctaaattctacaccatttcaactgaatatatagattatttaagagaaacggatagtaaagtaccttttaataaagatgaacagcatagtagaccgtatgtaggtgtattggaaaaaatcaatggtcatgattattttgtacctttaacatcacgtaacgataaaaattttaacagtcaggtcagtgtgaaattattcgatactgatgaaaagcgaattggagttttattggttaataacatgattccagtcccagaaaaagagtgtaaagaaattgatatagcagaaaaaacagcagcagaccctcagtatggtaatttgatgttaaaacagtatttatttttaaaagaaaatatggatcgagttactaataaagtggaaaaagtatataaagatgtaactgtacaaggaaagccttcacataaacaaaaattcttaaaaggagtttgttgtgatttccctaaattagaagaaaagtgccaagaatataaagaaagagatcaagctaaagaaagagataaagctagaagaatagcatatatgcgtcaaatggggcgtgagagataaaaaggacaacatagcgttatgttgtcctttttatatacaaaattttattagtgagaggaagaagaaaatgaaatatcaattagaatacgataaagttttaacaacgaaaaaagaatttgttctagaaaaaacaggagagattatttctggtgtttcaatgttaattcgttttggtaaagtttttgaaggaaagccttcagatggcttatatacatattttgaagaagcggattcaactttgtcaggactattaaggatagcttatgactctgaaacaaagaagtttgatttttactcacatgatattctgggggacaattatgaagttgttggttatacaaaagatgtaggtgtaggatttacagaaggtcattttattagtaaagaagaatttgaagagattattgagaaatatggtcacttctttgctactgataattccttacaaaactgtgcgtattgggttcatgaaattgaagaaaatgataatcaaaataacgaagtagaaacaatcgaagaatatttttctatggctttgggagtatctaaatcagagacgtatggatatattgcaagatatagtgaggaagttccggtttggtgtttccttttaaaacgtgatggtgctaaaggggagaaatattatggtgagcactgtcctttgaataatataaatctagaagatttgataaaagtattttctttgttttctaagcaagatagaaaaataattgtagatacagaaggttatttatacaaagacagggactacttatttaaaaatgagtttgtattaaatccaaaaccattagaaaagaatgctctgaatttggaacacggtacactagaggaatttattattgaggataatttgtatgactctgataaagaaggctatggatatattgtaagggctagcgaggaacaaccagtttggtgcttgttcttaaggagtgaggattctgatgggaataaatattgtagtggacactaccctttgcatattacggatatggaagatctgattaaagttttttcctggtactcaaaacatgagaaaagattaatcgtaaatacagagagctacttttttgcaagagaaataaaggaaatgaactatccaaatcgggtagaaaataattttttaaattcaactagctatttaattgaaaaagagtatgataatcgttttttaattcatcgagaattagaagatgacgaaattagtagatattctgaagctgaaatatgtgtatacaatggaaaaaaatacttagctgcaattgtagtttgttcttcagaagatgaagcggtagccgttgtaaaaagttattggagagcaattgatattttgattgaaggtaaatgaagagtgagtagtaatataaagcgaagaatcaataaaaacagtaagagcaacgtagcgatatgttgctctcttttttgtatacaaaatttaaaaggaggagatttgaatggagaagttagaaattgcaaaagaattactggaaaatagtttgaatgtttatataaagataaaaatagaagaatatatttttcgttttgaagggcttgaaagtggagtttattgcaataaacagaattttgaagatgactcaatgattcgttttcacaactgtattacttatatccacgagacaggttttaatataaagggctggatgttgtatgaaattcctatttattattctcattgtttttataacgaaagcattgggaaaaggtttgatttaatggtattaaatatcggtgaagtaatgccagcctatttagattactcagaagaaaaagctgctgaaacaatagaagaagctatagaaaaatatatttattaacccaattatgataaatgtacacaaatacacatttacacatgttcacatttttaggagtagcataattcatgctactcctttttttatacaaaattttaataatgagaggaagtaatacacatgactacattaattattgcggagaaaccatcacaagcgaaagcgtatacagaagcattcccgaaagttgagaagaaggatggctacttttctattgcgccttgttccttaatgccgaatggagcgaatattacatggggatatgggcatttagtggaattgaaagcaccacaagattataaagcagagtgggaaaaatgggatatgtcacaattgccaattttaccggagcgctacggatataaagtatcagccgataaaagaaagcagttcaacgttgtaaaaaaattaatgaaggaagcagattgtattacaattgcaacggatattgatagagagggtgaagcaatcgcacgtttaatcattcaagaagcgggctgttcttctaaaaaaatgaaacgcctttggatcaacagcttagaagtggatgaaattaaaaaaggatttcagaacttgaaggaaggctcggagtttgagagtatgtttgctgaagcacaggctcgtcaaattagtgattgggcaattggtatgaatgcgagccgattatatacgctgttattacgtcaaaaaggcgtacaaggtgtttacagcgttgggcgtgtgcaaacccctgttttatgtctcattaaccaacggcagcaggacatcaaacactttaagccatcccctttctttgaactagaaggacagtttaaagggatgaacggaacatacaagggaagatacaaagagcgattccaaacgaaaaatgaagtggaattgctactgaagaaacatcagctgtctgaaggagcgaatcagcaaggtgcagtaaaatccgttgaagtaaaaccgaagaaacaagaagcgccaaagttgttctctctttcttccttacaggctttagcgaataaaaagtacaagtattcacctgccgatacgttgaaaattgtccaagagctatacgaagcaaaacttgtgacctatccacgaacagactgtaatttcattacagaaaatgaatttgcttatttagtccgaaacctagagggatatcaatctattataggagtatccttccaaccaaaatcattagatccgaataaacgctacgtcgataatcaaaaagtacaggagcactatgccgttatagcgactaaaaatgttccttcgaaacaaaaggtagatcaattaacggacaagcagcgcaacttgtatacggaagtgttaaagagtgtgttaggcatgttccatgcgccttacgaatatgaagaaacaattattacaacagatatgaatgggttagagtttacgacaaaaggaaaatcggaaaaagcgttaggatggaaagaactttataaaacagatcaaccaagcgaagaagagagcgaagacagggaatccctccttccagttgtacaaaaaggcgaacttgtacaagggaagatacagacaaaagaaggcatcacaacaccaccaaatccttatacagagggacaacttattactttaatgaaaacatgcggcgcttcagtagaagatgaagaaagtaaaagcatcctaaaagaagtagaaggacttggtacggaagcaacacgagctggcatcattgaaacgctcaaaaagcaagaatatatagaagtgaaaaagaataaagtgacggttacaccgaaaggtgaaattctttgcgaagccgtgggcggcacgttattagcgaagcccgaaatgacagcgcaatgggaagggtatttgcgtaaaatcgggaagaaacaaggctctaaagaggtgtttgtagcgaagacaggggaatttaccaagcaattgatcgtcaacgctacgaagtcaattggtgagcttcagatagatagcaaagtacaagaaatgaaaacaaaggattccgtagggaaatgcccgaaatgtggcaaaggcatagcgaatcgcaaaacattttacggttgtacaggttataaggaaggttgtaagttctctcttccgagcgaatttttaacaaagaaaattagcgaagcaaacgttaaaaaattattaacgggtaagaaaacaggattaattaaaggaatgaaagggaaatcaggaaaagaatttgatgcgtatttgaagcttgattctagcggaaagatcacatttgaatttgctaaaaaataaacgagaatcatagtaaggggagaagaaagttgaatgtaaaaagattagtagaaaagggaaaatgggtgttaatgacgactggactagctatcgtgtccactctctttttttcctatataaaaagctattttggaatcgacacaggcaatgcagaacaggtgaatgcaaaagtagaattgaatatcttctatttaattgtccctctattaattgctcctgtaattgaagaatggattttcagaaagattctaccgtttggaatagaaaaactgtttgaacgaatcaatcgtacaacagcgattctcatcgctaatggtatctttgcagccgtgcattttgattggttcttcttcccttactttgtaaatggttgtttatatgcatggagttacgaaaagaccagagatataaaagtaccaatagtagcgcatatattatttaattcatttgtatttttggctacaagcctttattaaaaatgtacacatgttaacatatatacatgtccacaatatcgaattactctcacgttataaccaacaatgattggttcttcttccacgtctaatttgaaaattggagtgatatgaataagttaaaagcgcaataacataacgttatggcgcttttaatttggctttattttaatcatttgcatttgaaaaatgtcgctatccgttatgcctaatacttgcatttcttcccttaatgaacgccacgactcgattttaatagatttagtagtctggtctcgcaaggtgtatttgtgtataaaatatgactccttatttttcttcatcttaacacctccatctcacctgaaaaatctgtagctatataaaatttatatagcaagtgcagtgttttaacccttgttctcgttagttttctcatagtatgtatagtacctttttaaggatacgtcagttttaaagccgacttgcttaacaatatcttcagctgtgtattgctgttgaatcatctttaaaataaaggtatttcgaaaatgttgtgcagaaatccctttccttaaatttgctcgttttatctctaaacgaatcattttttgaactgacatgtccgttagaaattttggtgcgtcattgtcataactccaaagataagtccccaacctaaagtgaaaagcaacaaagagtggatcatcactgtgatatcttgggcgtactggttcgggaatagttttatagtaatgatataagtgtaatttatctacttcttttaactggattgtacgattaatctttgtgtcttcaggaatagatagtgtattgttctcaaaatgtacatgtttcattcgtaaagcgacaagctcatgtagagataatccgtagtctaggagcaagattataatagaaagatttcgttctaaaatcataggacggctagttcgttgtttttctgtcagcccctctaatgatgcggatacttgttttaggcgttcctcttcttgaatgctgataaagtcttcagtacgcaatgcacgatcaggtggagctatgtgaacaacaccttcaatggggctaggtaaatctaaatattcgtacagcctattaagaacgatgtaaatacgatgtaccgttttatcggagtattggcgttcttctattaaataattaaaaaatgcttcgaaatccttcttatatagggattcccaattcatttcttcagagtccgagaatcttcctgattgatgcagccattgaatacagctttctacatcatagatatatcgcttaatcgtagagggttttcgccctttatttaataaataagatgaaaatccttgtattgtatcttggttttttcttgtaatgttattgatttttattcctcctatcttcaaatcttttaaccactctataaaatgtagggctactcatattacacatttccatagcatatagcgctgttatctgtccgtgtttccacatattataggcattaataaattctggagttatttcagttctgggtcttcctaaatgttttccttttttctttgcagcgtcaataccctcacgttggcgagtttttatttttgttcgttcctcttcagcaagccacgataagatttgaagtaccaaatcagtaataagagtccctaaactatctttatattgagttgtatctaaaagtggcatatctaatacgataatatgagcctgtatattttgggtaatatctttccattcctcaaggatagcttctttatttcttccgaaccgatccagggaatggatatataaaatatcatcttttcttaacatgcgttttagaagttggtattgttcacggttaaagtctcttccgctctgcttatcgataaaaatatctcgttcatcagtgatgagtcgtttcatcgcttcaagttgacgatcctcattttggtctttgctactgactcttatatatccaaattttcttgtattcaaaataaatagacatcccttcaaaattggttctactaaaattataacaaaaatacttcaaaaggtatctttaattttttaatacttcaaaaatacggtttttaaccttttgaagtattaaatttaatagagtttaatgtacttcaaaaggtgtacctttcaggatagttgtagttgactttttgtttaagtttatagtgttaaaaattctatttttttatataattatatatttaataaattatctaaagatgataatacacatgagtgaaataaacgacactgtgtctgataatttttttggcacctgatattactcgtaatgtggaattcgatatatcaatagtagacaattcaaatatatagaaagagggtctgagatttatgaagaaagaaaagcgtaaaaaaactacatcgaaataaaagtgaaagaacaaaaagagaaaattcgtttggaagaaaagagaaattgtgaatttgatcggatgatgtgacttattgatatagcggtgagaattctaatgtggatattcaaagattaaatagaagaaacatgatgaagcaagagagaagaaagagtgtatgtttccaaagagcaataatatttattttcacattaaaaaaagaatgcagattaaatatctgcattcttttttattactattaataaatgctcattgttacgtaagcagcagggtatccaccaggattaggttcaattgcaattcgaataccagtagcttgtccaaatcggacttgtgttaaagcgttttgtaaaaaactaactctcttttttaaagctgtattaataaatgcaagtgataatcctactgactttgatagtgctggtccaagtagtgctattccttgagaaagtatccaatcaccaaggggttttccggttggtaatgatgataaagaacgacataagacaccttgtaattttgctttattccaatatacatattgagtttttgcagcggctaagggtgctagactattaggagaagttgaatttttaaagtcattgatttgtgaaggagtaaatcctagtgcttctaggtctaaatcgttgatatcgttgattggtattttaatttgattaagatcatttgattcttgcgtttgttgaattgtcgtgttttcaatagtatcagctgctaccttgttttcgctaaaaattgagagtgttgaaaccaatgttaatgcagtggcacaaacagataaacaaattttattttttctcataataacctcctatttttagaaaatttttactataataggattatacaagaaataaataatgaaaggaagatattttttggaaaaaattctattattttctatttattttttgagcatatttattggtactggattgatatttttatgggatatagttacttctccacttggttatgcagggatctatgtagcaattttacttattaattcatttgcatatctatttttaaaaaacagagtgaatagaaaacaaaatatgcaaattagtgtaattgcttttcttattgctgtagtgccgattgtacttctttacaattattaattagaatatattttaaagttagaaacttgaggcaaataaaaaaagagagggaagttggtcatctccctgtcaagtagacagtaataaaaagagtattatgccacggccttttcccgatattctatcggggaaaggccgtgtggagtgggggaaaaggtagagataacttcaaatccttacctatcactaacatgaatctgttcaaaaatctgattttgcagctgtatcggctgctcttcaagaactacttgaggtgcaatatcgacattatcaaaatcagctgcaaatgcaagagagaaaaaataatgaccatttaacctttatgaatcagtggattcatcaaatgaaaacacctttatctgtaatagaattaattacacaggatgaagtagattcacgttttgaaagtataaatgaggaaactgatcgattaaaaaagggattagaaatggctctgtatgtcgcacgtttagaagcatttacacaagatttttatgtagaaagagtacaactacataaaatagtgaatgattcggtacatgagcataaacggttctttatccggaattttgtatatccagagcttgaaattgataaggacattactgtagaaagtgatgcgaaatggttacaatttttaattgggcaaatactatcgaatgcgattaaatattcatcaggtagtagagaaaagattaaagtgaaagcttgtaaggaaggtaataccgttatacttgaaattgctgataatggcgtaggtataccgaagcaagatttaccaagagtcttcaaacctttctttacaggagaaaacggtagagattttaaagaatcaacaggaatggggctatatctcgtatatgaaattacgaagcaattaggacatagtgtagcaatccattcagaagttgataaaggtacggtagtacgagtaatgttttttaatgtgtaaaaagtgatcaaggctaaagaacgttggagataagttttttagccttgttttgtattttttaaaaagttttcatatgaataaatgatacaaattagtaaaaattaaagatatgagcacatgaaattgtaaaaataaacttgaagaaaaataattgcttttgaagtacaaataataatatttacgcatacagtattatcatggtacaatatggttattaatgacagaaaggaatgatgggtggacgatgattaactaatcttatttttaaatgttgaaattcaataaatttcaatttctaaaaaataggattagtctgcccaatttccatagaacggtattgctatttatgttatgtaatagcttatttgggtgtaaatattttaacgactaatcctgccaaatttatttgggaggatttttttattctcccttaatgaaagggatcggtattatgaaagaactattaacattaaatgatgtttatgttgaaataaaagaaaatatgttgttagagaaaatgaatgtgacagtaaaacaaggggatgttatcggattaattggtaaaaacggtgctggtaaatcaacgttacttcaattaataaatggaaagattgagccttcaaaagggattgttgaatggcagcaaatgaatatgacaaccgcatatgttgagcaagaaatagaatcttttattagtaatgatgtaattgcaaaagaagcagaacttcttgcgaaatggggcgtgccaacgaacgattttcatactttaagtggtggtgaaaagctgaaaattcgattagcaaaaggatttgctgaaaatcctaatgtcttaatattagacgaaccgacaaatcatttagatgagatcagtacgggatttctcattaaacaaataaaaaacatgaaaggtacagttatcgttgtatcgcatgatcgatattttttagatgttgtcgcaacaaaaatatggtcaattgaggacaaaaaattaattgagcatagtggtaattatacgagctacatgaaagcacgtgagcaaaaaagaaagtcgcagcagcgtgaatatgaaaaacaacaaaaaaagatagaacaagtagaaacacatataaaagaattgagttcatggtcacaaaaggcacacgcgcagtctacaaaacaagaaggtgtgaaagaattctatcgtgtaaaagcgaagcgaatggatgcacaagtgaagtcaaaacgaaaacgacttgaaaaagagctggagaaaacgaaagtagaacgtgtgaaagaagagtattcagttgagttttctattcaagcgaacaaaaaagtaggaaaacgctttttagaagtaaagcaattaaaaaaagactttcatgggaaagtattatttgaaaacgttaattttacaattcagcacggtgagaaagttgcgattgttggaccaaacggtagtgggaaaacaacattactgaagatgattatgggaacggaaactgctgaaggagaaatatggatttcaccttcagcaaacatcggctatttaacacaagaagtttttgatttaccgcttgataaaacaccagaaaatttattttttaaagagacgtttgaagaaagaggaaaagtccaaaatttaatgaaacatttaggattccaagcgtctcaatggaaagagccgattgagcatatgagtatgggagaaagagtaaagtgtaagctaatggcttatattttagatgaaaaagatgtactcattttagacgaaccgacgaatcacttggatctaccttcacgtgaacaacttgaaaatacattagctgagtataacggaacattagtaattgtatctcacgatcgatattttctggagaaaacaactaacacaaaactcgtgttttcaaacaatacgatacaaaagcagctagaagaacctactaaaacaagagatgatattgaagagctacgtttaacgttagaaacagagagacaagaagtattaggaaaattaagctttttaacttctaaagacaaagaatataaagcactggatgaacggtttatggaacttacgaagcagattaaggagctataacgtaaataagggggattaacatgggagaagagagattcactaagttatttaaaatagattgtggagatatatacttgcaagagtttacggtcaaagatgcagagagtatttataaaatagcaaatcaaccggaaatagcaaaatttttaccagactggaaatcaacgaaagaacaaagggtggattggattgcagattatgaaataccagcaaacaaagcatttcttgatgcagtgaaaactacgaataacatagataatcatatgttaaagctaggaatatttaagaaagctacaaatgaactcattggatggtgctgcacaggtatgaaagaagaactcccttcaccaaacagagagataatgtatgctatctcaaatgaatatcaaaatcatggctatgctacaaaagcgactaaaggtttaattgactatttgtttaaagaaacaaatttaaatgtccttaacgcaattgctttaattaacaatgtagcatcaaataaagttattgaaaaatgcgggtttatttataagagccaacagaggatagaaaatcaaatatataatcattatatattgagaaaatctgagtggataaaaatataacgtttggtagtaaaagaccgatagcaatcggtcttttctcatttatataataaagatttattatacattatatttcctactactatacaattattataagatagttatgcgttaattttagtttgaaataattatgttgtcattttttttagaaatcttacaagcgtgtaaggtaaatgaaagatgaatcaatatgagctgtaagacaattcatttacactttatagtgagcagtggaaatgaagggagaatatacatggaaattttacatgcaaaaagtattagtaaagtatataaagggaaagtaccttataaagcattagtagatattgatttatcaattcaagaaggtgaatttgtaggaattatgggtccatcaggtagcggaaaaacaacgttattgaatatggtatctactattgattctccatcatcgggagaaatatttattaatggcacaaatccttttcaattatcatcagaagaattagcgttattccgcagaaaacaattaggatttgtttttcaatcatttaatcttcttagcacacttactgtaaaagaaaacatcgtattgccgatgactttagatggtgtttccgtgcaagaaatgaacaagcgattggaagagattgcagagaagttaaatattacagatatattgaataaaagaacgtttgaaatatcagggggacaagctcaaagaacagcaatcgctcgtgcaattgttcataagccgcaattattacttgcagatgaaccaacagggaacttggactctaaatcttcaaatgatgtaatggagatgctggatactctaaataaagaagaaaaagcaacgatgatgttagttacacatgatccgtatgcagcgagcttttgcagccgagtaatctttattaaagatggtcaactatataacgaaatttattgtggtgaaagtaggcaaactttttatcaaaagattatggatgtcctttctttgttaggagggaaaaggcatgacttttcgtcagttcgcatttaataatatttttcgcaataagcgtacatatgctgcccattttttaagtagtgcattttctattatgattttctttacgtatgctcttttattatttcatcctgatttacaaggtgagttgaaatcgacaagtgcaacaataagtgcatttggtacattgggattttcagtttcgcaaggattgatttttgtattttcatttttcttcattttatattcagttagttcgtttttaaaaacgcgtaagaaagaatttggcattttaatgatgcaaggtatgtcaatgagacagcttaagaaattattattaattgaaaatatgttgattggacttggttcaatttgtatagggattttcattggactcatattttctaaactagtcttattgataagtgcaagtgtattaatgattaataatggtttacctttttatataccagtgcgggctgtattattaactgttatcacatttcttttcttgtttttaattgtttcattatttacatttaaaatgataaaagtaacggaacttgtggaacttattcgagcagaggaaaagccaaaacctgaaccgaaatcttcagttttattatcgctactttctttaattagtatagggtatggatatttttcagtatttcgcttcataccaagtaccaattttattacgcttggaataggtgtgctcctagtaattataggaacgtactttttatatacacagtgtagcgtgtatatattgcgccttgctaaaaggagagaatctttctttttaaagagaacaaatatattaacattttctgaattaatttaccgtatgaaagataatgcaacgatgttttttatagtatctattgtttcagcagttgcatttacagcaattggtacaacagccgcaattggaaatagggatttagtaaggatgacaaatccctatacatttttgtatggaagtcttgaaaatgacaaagtattgaataaaaatctttctattataaaaaagcacctttctgatgctaatattccgtatcgaatggcttcatcttcatatatatacacagaaaatggcgtaaatgtaatgaagttaagtgaatacaacgatcttgctaaagcactaggctatcaacaagaaaaaattgaaaaagaagatgaaattttattaattcctggagtcgtatcacaaaaacaagaatttaaaaatggcgagtataaaaagaatatagaagtcattcaaggtgactggacaaagacatttcatgtgaaaaaagctgtagaaaatttagttttaccacacgattctagaactatttatatcgctgttcaagatcaggtatatgatggaatgcctcttactagtgacccagttaataaagaaattccatatcgtacttacggatttgttgtagatgattggataaaaacgaaagagatttccaatcaattaaagagtatattcgataaagatcttagggacagagatttctactttgaagctttaacattaaacttgttggaagcaaagcaaaagaatggtttattacttatggtaagtattttagtcggaatcgtcttctttacattcgctgctagttttatttatttccgattatatacagatttggatcgcgatcagcagcaatataaaatgatttcgaaaatgggattaagtaaaggtgagttaaaaaaagttgtaacgagacagttattattaatgttctttttaccaattgtcgttgcagtgattcatactgtagtcgcttatatagcattacagcaattagtcgatttttctatcataaatagctctatcgttattttaatttcatttatatgtatacaagttttatatttctttataacccgttggcgttatctgcaaaagctttataaggttatggagcaatagaatttattagcttgtaagactacaataaagtatgtagaaaaatgaactgtatgatgaaaggaaacgagatgaaaagaactttaactatttttatgttaacgatactattattaataagttttagtgcatgttctaaaaaggaaaatccatttcctgcaaacggtgtattaattattggagatgaaaataatatttcaccaattattaatcgttatcaggaaattacggaagaaaatgaagtgttttctgtgaaaaaaggggaagttggaaatggaaatgtcttaattttaaatgaatctacagcacaagcattgattaaagaaaaactttttcgaaaacaagataatggctccaattatattatagatacgttaccgaaattccccaaagaaggggcgctattatttacaagtgaagacaataagactatgaaaagtattaaaataggagaggaagagattcctgttacatacgatagtgatgcttggataggtaacaatcgtaaatattcaacggaatggtatatgattgtagcaaaaaatagtgtttataaagaaataaaggcaaatgaaatgaaaatgcatcttcttcatttgaaaaaatcactaggtgacgaaaaacctaaaatgtcgacagataatacattggttaatgaaaatgtcaaagtaaaaaagttaattaaaggtttggaaggagaagtatcttttcactttgtaacgattggcgaaaaaccttaaaaaagagttcgaagttgataaaaatttcatcagcttcgaactctttttagtttatagacaaatcaattattatgctttacattacttcatttaatcgagtctcactcgtttcttcaatcgcatttgaattttgaactgaattattttgtgcttctttttctttacgagccttttgtagcatttcaagtataatccataaaggaacacctttatcctttaacatcttccataaatctaattcattaaatttatgctcaggctgtttcatttctttttcagatgaacgaatatcaaacttgataggatcatttattttcttactttcaagtttagtagaagagatagtattatgctcaagagtagatgaagttattttagtaggttgagataatgtatgaatatttgatccgatttgcatgctttttcctccttttcaagcaatgagattagttttcttatggtttttaaatctttttaacatgaggcaactatatctaattataaattcaaataaacagatttacaagttgtattgtaaaaagtaaatatttacttgaattaatatttatcaacatttgtatatgttttctatatatacaacgtatataaaatactttacattatgtttaagttgttaaagtattctgttaatttttttaaaaaagaaaaatgtaaacgttttattagggggagaaagtatggggaagttatttttaaaaatatgttttttcgcattagtgaccgtatgttcattcgcagcgaaaatatcatacgctgaagagaggcaacaaaataattatccaatcatattggtgaatggatttgctggatggggtagagaagaaatgcttggcgtaaaatattggggtggtgttcatgatatacaggaagatttgaaacgcaatggttatacggtacataccgcagctgttggacctgtttctagtaactgggatcgtgcatgtgaattgtatgcacaaattagcggtgggacagtagactatggtgccgtacatgctgagaaacatggacataatcgttttggcagaacttatagtggttttgcgccgaattggagtgaaacaaataaagttcatttagttggacatagcatgggtggacaaacgattagaacattagtacagctattaaaagaaggtagttttgaagaaaagaattatgtgaaaaatcacccagacatcaaaatatcaccactatttgaaggcggaaaatcatatgttcatagtgttacaacattagcaacccctcacaacggtacaacacttgcggatggtagtcttctactgccgttcgttaaagatttactcattacagctgcaagctttggaggaaacaataatttatcattatatgattttaaattggatcaatggggtataaagaaaaatgctggagagtcctttttccaatatagtaatcgtattctaaatagttcactttggaaaaatacaaaagatataagtcaatgggatttaagtacagatggtgcaaaggagttaaataattgggtaaagacgcaaccagatgtgtattatttatcctatagtggacatgcatcacaagcagcacctataacaggtttacatttaccgcatattacgatgaataaattgttgatggggaatgcatttttcttaggttcttatgcgagatatgaagaaaaccgtccgttagttgatacttcttggtggcaaaatgatggtgtagtaaatacgaattctatgattgcaccatcttctaatgttgctgtaaataataatgggtcattacagattggaaaatggaatcatatcgaaacgaaagcgaattgggatcatctcgatatggtaggattaagtgtttcagactcattaggtttttctagcattcaagagttttatagaacaattgctgaaaagctatcacgtttaccgaaataggtaataataaagcgctctcgatggaattcgagagcgctttatattatattgaaagagggatttggtagaaaaatatggggggatattatgaaaattcaagttgtattatcaggatacggaacagtaggcagagagtttataaaattattaaatgaaaaatattcatatatatatgaaacatatgggattcaattagttgtaagtggcgtattagggagaaatattgcaatacataatgaagacggcttatcacttcatcatttattgatgtatggtggcggtaccgctgcaattgaaaaatatttagagtatcatccgaaggaacgtgcaacaactagcataagtggtactgtattggtagaatcaacagttacaaatcttaaagatggaaatccagggaaacaatatatgaaacaagcgattgagaaacagatggatatagtagcaatttctaaaggggcgctcgttacaaactggagagaaataaatgaagcagcaagaggcgcaaatgtacgaattcgatatagcggtgcaacagccgctgcattaccgaccctagatatcggacaatttagtttagccggttgcagtattgaaaaaatagaaggaatattaaatggaacaactaattatattcttacgaaaatgtatgaggaagatatgacatttgaagaagcattgaaagaagcacaagataaaggaattgctgagacaaaccctatattagatataagtggttcagatagtgcgtgtaaattgttacttttgacaaacagcttaatggaaacagagaaaacacttactgatatacatataaaaggaatcgagcacgttacaaaacagcaaattagaaatgctaaggaacaacataaaattattaaattaatagcatcaacatataaggatgagggtggcaatgtgaatttaaatgttgaaccgtgcgaaatagaaaaagatcatccgttagcaaaagtaaatgggaccgaaaaaggaattacgttctttacagatacgatgggacaagttactacaattggtggggcttctaatccacgaggcgctgcagctgcagctttaaaagatgtgattaacttatatcgaaaagatttgtaagaccgtaccgccctttataaaaaatacatatgtcgtggaccttttgagaatgaaataaatatgaaaaaatgattgcagggggtaaggaattgtttaaggattttaaagttgttaaagatcgtcccgtttatattcaattgaaagattatttgaagaagatgattatgaaagggcatttgctcggggatcaaaaaatcccatcaacaagggaactaagtgaattactaagtgtgagtagaaacactgtactcgctgcttatgcagatttagaacaagaaggactcatttatgcagttaaaggaaaagggaactttgttgcgaaggtggatatatctaacacttcgtctgttgaaatagattggaaaaataaacttaatacagtgaccgcattagcggatgaattagatttaatgaaacatggtgttcgttgggaaaagggaatgattgtctttaatagtatagccccggatgagaagctatttgatgttgaaaatttcaaaagagcttttcttactcgtatgtccattgaaggagacatcgtattgaactacggatatgcaaagggatatagaccgttaatgaattatttacttcattacatggaaatgaaaggtgtagacatttcgaataaagatattctaattacaaatggatttacagaaggattggatattgtactctcttctttatcaaaaaaatctggtcgtgtcatttgtgagaatccaactcaccacgctgcactaaagctgttccgtttacatggacttgaagttcatgggattgatatgaatgaggatggtattgatacgaataaagttgaaaaaagcttgcgtgaaaaagattttgattttgcttatttaattccttcttatcataatccaaccggtattgttacgagttcagagaaaagaacggaattgatgaggttattctcaaaatacaacgttcctattatagaggacggatttaatgaagaattacgttattcaggttcacatttagctccattattaacttttgcgggagctggcaataatgtcatttatattagtagcttttcaaaggtacttttccctggtttacgtgtaggctggattattgcagataaagagctgattcattatttagaaagcgtaaaaagagcaagaacgattcacacatctacgctagatcaagctgttctgtttcaatatttacatgagggatattttgagaaatatttaaaaaaggcaagatctgtttataagaaaaaatatgagttagctgtcggggcatgtaaccagtacattcatttcaaaagaatgactggagatggtggacttcatttatttatagaactagaagagcatatgaatgcccgcacacttttacaaaagtgttatgagaaaggcgttacgttttcacctggagatgttttttactctgatggagaaggagcgaacactttccgattagggttttcgcgcttgaaagaagaagaaatagttcggggaattaaaataattggtgatacattaaaaaatgaaatttggagttgagaaaatgaaaatcggtgttattatgggcggggtatcgtctgaaaaacaagtttcaattatgacggggaatgaaatgattgctcatttagataaaaataagtatgaaatagttccaattacattaaatgaaaaagtggatttaattgaaaaagcgaaagacattgactttgcgttgctcgcgttacacggaaaatacggagaagatgggacagttcaaggaacactggagagtttagggattccttatagcggaagtaatatgttatctagcagtatatgtatggataaaaatatttcgaaaaagattttacgttatgaaggtgtagaaacaccagattggattgaacttacaaaaatggaggatctaaatcttgatgagttagataagttaggatttccattagtagtaaaaccaaactctggcggatcgagtgtcggagtgaaaatcgtttataataaaaatgaattgatctcaatgctagaaactgtattcgaatgggattctgaagtagtaattgagaagtatataaaaggtgatgaaattacatgttcaattctggatggaaaacagttacctatagtttcaattcgacatgcagccgagttctttgactacaatgcaaaatatgatgatactagtacagttgaggaagtcatcgaacttccagtagaaattaatgaacgtgtaaataaagcgtcacttgcttgttataaagcattaaaatgtagtgtttatgcaagagttgatatgatggtgaaggacggaattccatatgtaatggaaattaatacattaccagggatgacacaatcaagtttattgccaaaaagtgcagaagcggcgggaattagttatagcgaactattagatatgattattgaaacatcattaaaagttagaaaagaagaagggttttaagggaattatataactaattttttgacagtttcacgaagtatgctatgatgaatacattataaaaacaaaatatttatccactaggggggccttttataggctgagatcaaatgtgattttgagactcttagtacctgatctggttaatgccagcgtagggaagtgggaaagacgttgctatttaatgagtaaataaatactgtcgatttcactttctttacgcctgtaaagaaagtttttttattttacagctttaataattgtggataaatacttatattttatacattattggagggatttaaatgactttttcacaatcgttacgtaaagaagtagattcaatttgggaagcgagttttaaccatccttttgtaaaaaaacttggtgaaggaacgttagatttagctagttttcgttattatgtgcttcaagattcatattatttgagccattttgctagagtacaaactttaggagctgcgaaagctcttgaattagagacgacagctcgtatggcacatcatgctcaaaatacatatgaggcagagttatctttacatgagaattttgcgaagaaattagggataacaaaagaagaaaaagataattttattcctgcgccaactgcatatgcgtatacttcacatatgtatcgtgctgggtatgaagggcatttaggagatatcattgcagcaattttaccttgctattggttgtattatgaaattggcgaacgcttaaaagagtgccagccggaagagccaatttataacgaatggatttctgcttatggatctgattggttccgtacgctagttgaagaacaaattacacgtttagatactatcgctgaaaaagtaacagaggcagatcgcaaacgtatgaaacagcattttattattagcagtcaatatgaatattcattttgggaaatggcttatacattagaaaagtggccagtggatacagacgtaaaagacgtaattggataaagaatagaagtaatgttatagctaggtatggatcatacctagctatatattttttcttgtcaaatttgcgtaaagtcattagtgctacggaaatggcgaaatagaatatcgataatttagctcatttacttgtctacgcattaactggataaacttctgtcacatttattttacaatcaaagaacgtaaatgttggtggtatgaagttaaataagaaaagaaacccgagctgttagctgtaacggagttgttttttctttgcaggaatttctaaattatcatggagtgttgttaatacgatatgcaaatatgcatatcgtatttttttgagttctttatgtgttaaaattagatatagagatatggaaatataaagaagcaaaagcaggaataaccaatgaattttgagaggtgttatatgtttacaaataagaaattaattcgatttggtttatcgttgtttgtatttttagggataattaattttacaatcagctatttccaaacatatcttgaaacagcagcagatattaaatgggtaattccagaaatttggaaaactattttgctagatgttcctcaagggatacttgttcttttaggcgcaattgctttatatgatttcacaaaagaggcatcaaaaaaagacgcatcaatctaaatgtgtcttttttcaattagcaatttcatatagagatttgctggagaaatagaatgaaaagccctaattagggcttttttttgttggaatttcttaaccgtcatagaaaccggtcacttggaggtgttatagcgaaagccatttacagtacagaaaaatctaagcagcagacggaaatatataggatatggcatcataattgttgagaaattaattgaacttagtaagtatgaagatatgacgctagaattcatattttttaatttttatttatcccgctatttgccgggcagtaagccccccacctcaaaattcagcggaagcaaagaagttaggtaggggatgaacaaaaccccactgattaaagtttcactttataaaaatgagcccatagtaaaaataggtatatgaacaaggtgcatcatctagtgataagtcatactttgttggtgtacgtattgaacttagtttatagcgctatttctacttagatgtaacgaacaggaatatagggaagtatcgatgaggttgtattttataaacggaggttatgaaaatgaatcagtttcaacaagaactacaagcgttaagccttaatgattaccggtctggaaatattgtctattgggaccagcaaaaccaatatccatattactatattgaagatgctgctcgtcgctgtggcggttgtggtcgttgtggcggttgtggtggaggtcgttgtggcggcttccgttgtggtggcttccgttgtattggttgcttcggttgttttggttgcggaggctgtggcggttgtggcggctgtggtggttgctctaactgttttgatggttttactgatactaccggtactattgtaacgtatgaatattgataacatctatcttgctagttgcgggcagtaacatccccaaaaaaattcagcgagagcaaagagaagttaggtggcggactgcccataaaagcccgattggtgagagctgattaaagtttcactttatcaattaaaaaacattagttatatgtacgtgccgacaaagaatatagccattattaatggatatattcaatcattcaagtgaaagagtaacaataagatatatagatgtaatcaagatgtgatggataaagcaatgactagatttaaaatctaatcattgtttttttcttatggttttatcattaaatatctgtctagtttgggcattgattccttctagctaatgattttattacaaccgtgtaaggttaatgtaatgttaatcgatagtaaaataagttgcttaagtgtattttaaataagattaaaaagtactgtttatctacaaaataatagggtaaatactatgtaattaggaagtgtatgaatatggttgaactaaaatctattttccattcgtataaactaaagagaaaaatagctaaagatttatacggaaaaagagatgaattatcactgttattaaatgaatttaataatatgaaatgtacagtaacatctgaaaagaagaaaaataatatattatctcgtttgcaactaatttatcaaaatatgaaatcggataagcagtaccctctagcagttgcttttgatagtaaattattggagcgattagaaaaagaatctgtacatactattgaggatggtgtaacatgtctacatttaatgttagatatgaattatgagaagataaaacaatatggttcgggtacaagtaggtcattcgttccattatcgcagtcttctatttgtcttgctgattgtatttgtttaacaggatttgtagtaggtttactaggaacaatttcatttggaggattactgttatctatatgttcaattacataacgcttaatatttgtaaagagagcgccgatttaaggtgttcttttttagttttttgtaaattttttgtaaatgataagtacaatacattatataaattgtataatttaaatgtattaaaatataaatataatgaggtgctgtatatgataattacttttaattgttaaaagagtcgatttgataatgttttattcagataaatagtttttacttttcttttaaatacttgatttaaatggattagattaagtaactattgttctagctttttgataatcaagacaactgaagaaaggaaggaatcattttatgaaaaaattaaggctgctaacatttgaaaatatagtagaaccccttttaaatgaaaaggtatcatttatatactttcctattgaatggctggacatcgtagagatacattataagacatttttattaacgagtaagttgaaacgtttgaatgaaagattgtatgatatgttttcagatatattgtttattcagcataatccgtacgtattaaatgaaaatacaccatggattgtatcaaaagaacctattaaacaagagcagctcgattatatttttcaaagttggtatgagattattcatgattggaagccaaatagattagtagaaccaccaaaatatgaatggcaatccgatttgatttctaatttgccagtactacatgataatgaaacgtattctaagtggatacccgctttaatctcacatattttttgtgagcgtcctatatatttagaaaatacaaatgaagaagaattctatttttctcctctgagatcacaaaatatttgtgaggcgatgtcagagccgataaaagatgaaaaaacacaagattttttctcctatgtatatcgatttcaatgcataacccgcggtggtgagaacgctccattattaaatatttcaatagggattcggagattttatcaagaatataatcatccagatattcctttacttttaagacggaaacgaggcatgatattgatttctacctcagagtttgcgtcaaataataaaaaaatacggtttgtaaaactaaaaatacaacaagctacaaccggtatgaaatggattaaaatatttagaaatttaaaagatgattttcaaatagggggagaggtggatttagaccatattctccaatatccgaaagattatattgtaggggaaaataaaagggtgttatttccatacaatgagagaatttataaagttcaaggtactaaaatagaaccgggtataaaagtaaaggaaagagagtatttatttaaagaatttcagcgtaaattctcttatttcacaatacttccagaatgtaaaaaggtagcaacaaataacaaaaatgaattatttcctttatttgcaccaaaaggattagagacattaacattagaggtttggtctgaaaatatagtgctggaaatagaacaagcattacttgatagtgaaattattttgactaaagttggtgaaaatacttacgtattgaatacagattttccagtgttattaaaggttgtgagatacaatattgaaaaggtgttacaaaatccatataaaatgcaatattgccaaaaatataaaacaaatcttgtagatgatgttacgaaagctgtctatgctaccgcgggcgagcgcagtgatgcgacattagcattaatcgcattgaaaaattgtgatggacgagaaaaaattgatccaaaacaaatcattagagagggatttgcacgagcaaaccgtatttcaacatttattaatttatttataggccaaagtgtatcgcgtaaaacaattgtaaatagtgtttttagtttattagagcaaaaaggatttttgaagcgtagttggaataagataaatttaccttgtatatatgttaatttatcaattgaacgaatatcgaaatttgatttcttacctattctttcaaaaataaaaggaaaagaaattttatataaattatatgggaatacagaatggcaaacgattgattacgtattattaaatataaataaacataatgcatttttaccacaaccatcaaagagaaatgatatgggagctctttttaaacaatatgtttccgaaacattaatggaaattgtacaatatgcaaaagaacaaaatgaacaagtttacttcattgtagatgcaaatttgagaaggtattggataaaaaagttacaaaataaagaaattaatacagatattttacctgatattgttccagaggtgttaaaggttccaaatttaaatattattagaataaatacaggttttgatgtaccaagttacggtgtaatagaatgtgatgatgctctagatagcattggcttatatgcagatcaaaaagggatgtattatagcactggtgaatattcacttaattgtagtgggatttttcagcgatatatacttgaaattctaccattaggtgtaaaacctgtagaaagggattatatcgctaaaatgatacattacatgtgctgtaattctagtatgctttcgaaaaagaatgtacacatgacatattccatgcatatggaaaaggtaataaagagttatattactgacatagatgcaagagagtttaaagaatttgatgatgaattggatgtagatgtagtaaaagtagaaaagaaagattcaattattctactttaaatactagtaaacaaatcctgctcgttatatcgatcaggatttgtcattttttcatgtaaataaggatatcctttgtcaagtatcttttcgtttacatatttactttatgtgcagacaggattaatatgttttttagaaatacaaaaactatttcatatggaaaaacgatttttattaattgaaaaaatttgaaaggaatggggaattgtgaagaaattagatgtgctcttaatgctactgagcggcctctttccaattgcaggacttacaaagcaaatccctctagaacaatctatatatattggagggcttttattttttactagtttcggtagttattttgctaaaaagatgtattcacgtatatgcagttggatagcgtatgcgccatttataacattactgttagttatttggcatcaagatatttcaacaagctcaatcatagcaaatgcgaaaattgctgcatgtgtcgcgttaattccatgtttattccgttttcgtacatatggacttactttgggcttattctcattatgggccgctttactatgggatataaaagaagtacagtcgttagtcatacttgaacgcataacgagtttaatgacaagccattatgtatatatattactattaattggaggacttgtaataggaggattacttgcgatgttcattcaccgcaaagagaaagataataataaagaaaatataaatctacttggaccaaaaaagaaacgcaaaagattatcatttaagattcgtcttccaagattaccgaaattaaagatgaaactatttaagtttggtgggaaagaatctaaaagtaaaatgccagaaaaaatccatgaatataagtacgaagaaccagttgcaacgtatgaaatgacagagaaaatagatccatacaaagaaaatgcagttcaaggtcaaacaaggatggaacgccgaagaaataggtataatgcataatgaagtttaataaccccgtaatgacttatcttaatattgataaatcattacggtttttttatgtaataaaatgaaggttgctattgcggaggggaatagcatattttatagataggaactaaaataaggggaggataaaatgcttatcattacatatatatctgcttgcatattattcttagttagctttttacatgtatattgggctttcggaggtaattgggggacaaatagtgttattccaactaaatcaggggaaaaggcgtttacacctcgcgcccgaatgacattgttcattgcattattattaagtatggcagcaataattttgttgcaacaagcaaatattgttcattttgcagttcctaatgttattattcaagtcggttcctggatttgtatgattgtcttttctattagagtgattggtgagtttaactattttggtatctttaaacgacaaaaagatacgcactttgcaagaatggataccggtttatatattccactttgtgcatttttatctttatctttcctattagcgataattttgtgagtgaataatagtagtttcttttctcaacatatatgtaaacgtgagaaatctaagagtaaataaaaaggatgtaagcgccttcttgtcgaaatgtaaattattatgaaagaccaactatgagaagtcaaggggagttttttatataaatagggggtgttttataaaaaatgcacctccaattgttagactgtgtctaacaattggggtgcacttcatattagatggcttttgtatgttacgtgtataaagttatttgaaaataacgatcgaataataggtgagattataacaatatttgtgtaagagaataaaaaatgtagataatttcgattttcaaaaaaatcaatttgaaaatatgtttttattttgcaactaaatatgttactatatgtgtgataaaaacaaagaggtctgacatctacactccacataataatactctaatgatttgaaaattcaaaaaaatcaaaatttaaaataataattgtattaatgattagagtaaaaataaggggaatggagaaattatggagaaagacactgctttgtaaggggcatattttatcatcttgagcagagaggaggatgcatagcatattgtaaaatatagagataaacaatgaaaaagtgctatgcaaatgaagagcatgaagggacgtttaaggccaggtgatacggtagcaattggtttaatgctatttgcattatttttaggagcaggaaatttaatttttccgccagttttaggtcaacaagcaggagagaatgtttggattgctacaataggattccttgtaacgggagtcggattacccctactagctgtaacagctgtcgcgtttgtagagggggacttgaaagcgctatcttctagagtccaccctatatttgcgtttattttcccattgattagttatttagcaattggaccatttttcgcgattcctcgtactggagctgtttcgtttgaaatgggtatgaagccgtttttatcagaggcaatggtttcagagtggtacatgctatttcttttcacgatagttttcttcggaataacgtggtatttatcattaaatccatctaaattagtggattggttcggaaagtttcttacaccattattagtattaattgtcgctgttattgtcggaaaggcaattattgatccaattggagagccagctgcgccgttagctgcttacaaagaaaatgctttctttggtggatttattcaaggatatttaacgatggatgcaattagcgcgctcgtattcggaattgtcgttgtacaagttatccgctctaaagggataaaagagagtagtcaaattgcaaaaataacagtagtatcaggtattattgctgtacttggtttaacgttaatttatttatcacttgcttatcttggttcaacaagtacatcacttggtatctcagaaaacggtggtcttattttaacgaatgttgtaaatgagctatatgggacgagtggtaaaattttattagggcttgttattatactcgcttgtttaacaacttctgttgggctaacatctgcgtgtgcgggtttctttacaaacttattcccaaaactttcgcataaaacgattgtaacaatggtatgtgtatttagtttaattgtatctaacctaggtttaacgcaattaatcgcagtaacattacctgtgttaatgatcatttatccagttgcaattgtattaatcgtactttcttatttccataagtggattgggaagcgtaatacaatttatattggagctattttaggtgcattgttaattagtttctttaacggtttagaaagtgcgaaaattaaaattgacgcgatttctaatgtactacaaatgttaccgttatataacgaaggaatcggatggttaattccatcatgtattggcgggattctcggtttcttcttctataaatcaaatgaatcaagtgaattacaaaagaaaggtgcttaggcacctttctttttttgaaggggatttttgtattttgtctaagtaataattggggggaatgataaatggctaattttgaagattttttaaatttggatttgagaattggaactgtaatacatgcagaggaatttaaagaagcgagagtaccagcgattaaactagcaatagattttggagaaatcgggataaagcagtcaagtgctcaaattacgaaaaggtatagtccagaagatttaatcggtcaacaaatcgttgctgttgtaaactttccaccaaagcgtgtagctggattcaaatcagaagtacttgtgcttggtggtgttcctgaagctgatgatgttgtgttacttcagcctaatatgaaattgccaaatggaacaaaaattagctagggtgaaggtaggggctaatatggatatcggacgagaatatttacaatgtgcgatttcgaactttaaagcaacaaagaaacaaggggaacgggcactttctcaattatcatatgaacaaatacaatggtcttctcatgaagaaacaaatagtatagcgattattattaagcatctgcacggtaatatgcgttctagatggacggattttttaacgtctgatggtgaaaaaacagatcgtaatcgagatggtgaatttgaaggatgctatcactcaaaagaagaaacccttatagcttggcaagaaggatggaaatatgtttttaatacgatgaatactttaacgccggaacacttattgaagacggtatacattcgcggtgaagcacatactgtcatgcaagcaattgaaaggcaaattgctcattatgcattgcatattggtcagattatttacattgggaagatgttaaaagaaaatgagtgggaatgtttaagtattccgagaggtcagtctgcgcgttatgtagagaaaaaacgttcaacataataataagaaagaaaccgataaaaaatgggaaaaaagaaagtcagccaaataatagatggttctgtaatcataagaatactgccaaaaataattccatatataataagaaagaaattgaaaagtgtattcacagggagaaatcgtgagataaacacttgctgtcgtttaaaacaatcactgtgaaataaataaaagcggaagtaccatgtggctgtaataaggtctttctttctcacaattctttttttgcatgtatgacagataaatggtggttgcatttcattacgctccattttttattttcataataatgtgagacaaaagtaggtacaaagtgtatgttcctatatacgctcctgcaataaggaaaaatggattcagtaaaattccatgaatgctcgtcatgaaaactaaatcttgtattaaaacatcgtatatattaatggaaataattgtaccgagtacatacagtgccaagtacgcagaaatatgtagcacaatagagatttttggttgcttagcggacaaataaaaaatgaatgatagagcgattggtaatattcctattaatagcttcaattcatttcacctcattaacaatatagccggaattttaacggtctattctctagggcttgtacataacttaaaatagagaggtgatagtatgaatcggggctttttttttatgaagtttacaaatatgcgtaagttagttttatttgttattactacaatgctagcgactttttttcttattagtctgatggtaacctctatgaaagagacaaagtcaacgtatttatataattggttaaatgagttatcgatgaatggttacatgtatgtacttggaaaagagaatcattattttacacaggagtatcgaaatttgaatcaagatttttcaatttcttcttttctcttttctatggctacaaatattcgctttaatgatgtacgcagtttcgtcgggaaagagctcccggggtttggtaagtacgatacagaaattgttattgcgggtgagggtacaaattattctaacttaccgatagagtcgagtgttcctcttgaagaagtagtgaaggaacggactagtggaactggacaagcacctaaacaagatacgagtaaagagaaaaaacagccgtcccaaacgaccgggaagagacaagttgcgtttatttatcatacacatagctgggaatcttatttacctttacttaacttaacgaatgacccggatccgaataaagcaacgagttctgtatcgaatatttctatattaggagatcgtttccgtgaacaactagaaggagaagggattggagctactaacgataagagtgatgttggtcaaaagttaataagtaaaggtttaaacagtaatagttcgtataagatgtcacgagaaattgtgcagcaagctatggctggaaataaagatcttcaatacttttttgatttgcatcgtgatagtgcccgaaagaatgtaacgacaaaaacaattggagataaatcatatgcaaagcttgcatttgtagtagggaaaggaaataaaaactatgaaaaaaacttacaattagcgacagctttacatgaggcgattaataagaaatatccaggagtgagtcgtggggtcattcaaaaagggttccagacaggaaatggaatctataatcaagacttatcaggacaagcgatattaatagaagttggcggtgtagataatacagtggaagaattgaatcgatcaattgatgcacttgctaaagcatttggtgaatatttttggcaggcagaaaaagtgaatggataaagtgaaacgtgaattagccaggacatctatcgataattattagctcacttcaatcttgaaaaaacgtaagtgtaatgcttgcgttttttctttgtaatggtgagacgtcacagaatagacataatttgtcgttgttatagtaatatcgaaatttgtcaatttatagtaggagatttacaaaggaattttcgggaaagtagagaaaatctttttataaggaaaactttttattatgaaactggtagggtgattgaagtgattagggaaatcgaaatagaagatgcagcatcatttttgcaattaagtaagcaattagatgaagaaacgaagtttatgctatatgaaccaggagaaaggaaaactacagctgagcaacaagaaaaaatgatccatcgatttatggaaaatgaatatgcaacaatatttgtagcagttgaagatgagaggatagtaggttttatattagtgaatggaaataacattcaaagaaagaggcatgtggcaagcattgtaattggtattttgcaagagtataacgggcgaggtattgggactagattgtttaaagaggttgagaagtgggcaaaattacatgatgtatggcgtttagaattaacagtaatggcccacaatacaagagctcaggcactatataaaaaagctggatttgagaaagaaggtgtcaaaaaagctgctcttattatcgatggaaagggcatcgatgagtatgaaatggccaaattattaaaataagaggtcgttatatgaaaaaaagatgggcactacttggtattgtagctgcaataattattattggagtagcaggaatcaattataaaatgtataaggataagcaggcgcgggaagtaagtgtaaatagcatatttccgaaagcgaaagaaacgattgctaatatggatggggatattgcggtaattaataatccgaattcaatgcttgtacttgtaaataaaagtaggcgtttaccagatgggtatagaccgccagatttagttattccgaaagtgcgctactctagtgaaggtgatcaagaaaagaaaaagatgagaaaagaggcagcgagggcgcttgaggatatgtttcagcaggctgacaacgagcgtatttttctttttgcagtttctggatttagatcttttgatcgacaaaaagcattaaatacgatgtataaaaaacaagacggggaagcaaaaacagcaatgtctagcgcggttcctggcacaagtgagcatcaaactggactagctatggatattacgtctcaatctgctaaatttcagttagagacggtttttggggaaacgaaagaaggtcagtggctttctgaaaatgcccataaatttggttttgttgttcgatacacaaaagcgaaagaaacgattacgggttatcggtatgaaccatggcacgtaaggtatgtgggaaatccacaagctacatatttgtatgataatcaactgacgcttgaagaagtaacagagtaaatgattgaggggagagacgtataatgacgatgttatataagaaaaaagtacatgcatatattacaagagaaaaagagggggttatgcaattacttgtttttaaacatcgtgatatacatgaagctggtattcaagtgccaggaggaacggttaatgaaggtgaaacgttagaagcggctatattgcgtgaagtacaggaagaatccggattgcgtcatttatgcatagaacgttttttagcagattacatcatacatatgaaagaaaaacaggaatatgaaaaatgccacttttttcatgtaactttactaacagatgtaaaggatacttgggaacatattgtaagtgctggtgaggaagataaaggattagtattttgctacgaatgggttgatattgcaaaatgccctgaattagctgggaaacaaggtgagtttttacatttgttagatgaagtatacgcacagtaatgtaagagtctgaagcgaaggttaatccgtttcagactatttttatttttcggtaaattaaaggtgtttaaataaggaaattgaatttctttaaaggaatattaatttaggatgtgttgaggtgaaaaaaatgaaaaagtaaggggtatacgctaaaaaagttcatataagggagaatataaatggaaattcagtttaatccaatcttaaaaaaggaattaacaattcaagatattcaaaatgaaatggaatcaggaaagttaacttcaaaagagctagtgatgtattatctttatagaatcgcaaagtatgatcaagacggaccgaaaatcaattcaattttagaaatcaatccagatgcaatttttattgcagaagcgttagattatgaaagaaagacaaaaggtataaggggtccattacatggaatacctgttttgcttaaggataatattgaaacgaatgactccatgcatacaagtgcaggtacaatagctctagaacaaaatataagcagtgaagatgcatttctcgttactcaactgcgagaagcaggggcagtgataattggaaaaacgaatatgacagaattagcaaatgcaatgtcttttgaaatgtgggctggatatagtgcaaaaggtggtcaaacaatcaatccatacggaacgggcaaggatcatatgtttgttggcggatctagtacaggatctgcgatagcagttgctgctaactttacagtagtatctgttgggacagaaaccgatgcttctattttgagccccgctgttcaaaattctgtagtaggtattaaaccgactgtcggtttaattagtcgtagaggaattattccatttacttattcacaagatacagctggaccatttgctagaacggtaacagatgctgctattttgctagggagtttaactggagtggatgagaaagatgtagttactcgaaaaagtgaaaatagggcatatcgggattatacatcttaccttgatgcaaatggtttaaatggagcgaagattggtgtgtttaacgatgcaccaaaagattattacgaaaatggtgagtatgatgaaatcttgtttaaggaaacgattcaagtattacgtaatgaaggagcgacagtagtagaaaatattgatattccttcttttcatagagaatggagctggggagttccgctttatgagctgaagcatagtttagataactatctttctaaattaccttctactatcccggtacattctatttcggagttaatggagtttaataaaaacatagcagaaagagctttaaaatatggacaaactaagttagagggaagaaaagattttcctaatactttacgaaatccagaatatttaaatgcgagattagaagatatatatttttctcaagaacaaggcattgattttgcattggaaaaatataatcttgatgcgatactgtttccttcctatataggttctactatatgtgcaaaagcgggttatccgtctatagcaataccagcagggtatatggaaagcgggaggccttttggaattaccattgcaagcactgcctttagtgaagggatattaattaaattagcttatgcttttgaacaagcgacaaagcatagaaaaatcctcaacttatcatgaatagaataaacaaagaggacaggaatccctgtcctctttgttttagtgattaaattgaaatatcgttctgctctgtcttatgatattttaataaactaaaagataaacaagcggaacataaaataagaatagaagcgatgatataaattgtacgaacaccgaacatatcagtaataatgccaatgctaagcatagatagtccagaggctgttgaaagaagtgcaccatgtgctgtatacattttggataataaagcaggggcgacacttgattgtaaaacagtcgtttgggaaatatctctaatttgataacatggtcccattagaacacatagaaaaagcgcaataaatccgctgctcgtcataccatataaaaatgtaagaatgctaaatataagagagccaatcgacatagatcgtattaaattgttttgaatataggaactcattttccatgctaatagaccaccgattaacgtgccaacataataacttgtattaatatatccccaccattcttcgcctttatgaaggatagtcgtaacgtatgccatcgtaatagcaccaatccatattgtccctgcgaaagtttcgattaagtccatatatgtaacggtacggagagaaggattttgaaataggagtttccaaccttccaataaaacagtacttttggaagagggagaatctgctattctttcagtatgtatggaacgtaatgaaaaatgtaaggcaatgcatccgaaaatcattaaaatgttattaatcatgagtgtagaagtagcgccaatgagaagaacgacaatactcgtaaatgaataagcaacggcttgcacaatttgtgttgaaaaggaaaagatactatttacttttactaatttttctttcggtgtaaggcgcgggagaataccgtataataacggagcactccacccactacataatgaaatgacaaaaataaaagttaatagagctataatgtttgtggataagaccgggaacaaaatcattaataatagtaaaaagactgttttcagccattggagcgtatataacagcgtataagatggaaaacgatttattataagtggtgcagagatgttagcaattagatttgtgataacttgtaataatggaaaaagagcagtaatagtagctgatttagttgctatataaatatgagttgtaataatcattacatatacgatgtcagcgagagtaatgcatattttggaacctaaatagtagattagtgacaggtttctcaataagattatcacctctataaaaaatagtatttagtaattagaataattgtaatttaaaaattaaaatttttaaagaatttaattttttgtcactttttgaaagggattttcatgtataatgaaggatatattgatatagtattatattaatgatcattgtaacagtgagtatgtacaatagcttgtagcaaacgcccaagtgtaagaaagggcggataaaccattcttttcttcatatacatatagaaaatgagaaagaaagtgagggttgcatatggctgcttgggtaatttggtttataatagctggtattttatttatcgcagaaatgttgtcgattacattttacatgctttggcttggaattggagctgttgtcggaggtcttattgctttgtttgctcctgatgcactactgttacaagttactgttggtgcaattgttagtttaactttgacattctttacgaaaagaatttcaaaaaactttcgagaagcaaaaggttttactgatacagtagatatgcttgttggtaaaaaagggattgttatgcaaacgattacaaatgaagcgaatggtattgtgaaagtggatggagatacttggacagctattgcagattcttcaattgatgctggagaaaaagtcgttgttataaagaggcatagtactatattacaagtgaaaaaggagagtgaataaatatggtagcattaacgttaacgattatattcgcactaattgtagttacatttatcgcattaacaattaaaattattcctcagcaaaaagttggggttgttgaaagatttggtaagtttcaacgtatcatgcacccagggttaaatattttaataccaattgtagatcgtgttcgtgtatatcatgacttacgtattcaacaaacgaatgtaccaccgcaaaaggtaattacgaaagataatgttcaagtagaaattgatactattattttctatcaaattgttgaaccagaacttgcgacatatggtatttcaaactatgaatatggtgttcgtaatattacttcagcaacgatgcgtcaaattatcggtaaaatggaactggatgaaacgttatctggtcgtgaaaaaatttcaacagaaatccgcttagcgcttgatgaagcaacagaaaaatggggcgtacgtattgaacgtgtcgaagttgttgatattaacccgccaaaagatgtgcaagcatcaatggaaaaacaaatgaaggctgagcgtaataaacgtgcgattattttagaagctgaagcagcaaaacaagataaagtccttcgtgctgaaggggaaaagcaaagtaaaatcttgatggctgaaggggataaagaagcgcgtattcgcgaagctgaaggtataaaagaagcaaaagaattagaagcgcaaggggaagcaagggcaattgaagaaatcgcaaaagcagaacaaaatcgtattgaattgcttcgtgaagcgaatttggatgagcgtatacttgcttacaaatcatttgaatcattagctgaagttgcaaaaggaccagcaaataaagtctttattccgtctaatgcaattgaaacacttggtactcttggggcaattggagaaatatttaaagaaaaacaagtgaagaaactaccttcaaatgatacaggaaaagaacaataaaagtgaggaagagaaatgggataccatttctcttttttttgcgtatattccgaaaagcttgtacatatccatgtataaagaaggtgatgcagtgaaaaagtatgcaactcgaatacatgggaagaaactgatttcgttactccttttatatgcgctaatagtaattatgatagcgtcgattttgacgtcatttttacatacaatgaaatcgaattatgcaaatcaatggtttggaaaagtatcgatgcaaggttttgttcaaatgatagaaagtgagaatcgctattacggatttgattattttaagaagaataaaagagagtcagttggaaatttaatgttctctattgcgacagatttgaaaattaaagatttaagaacattcgtcggtaaagaagtacctggtatgtcaaagtattattctaatattatcgtagctggggaagggacaaacttgacgaatatcccaaatgaatctagtgtaccgattgaagaagtaacgaaagaacgggaagtagcaaaagataaagttacagaagcggaaaagaataatccggttcagaaaaagaacggagcgaaaaaaggtgaaagtgcagtatatatttatcatacacatagctgggaatccttctttccattattaccaggggctacggatccatcaagtccagatgtaaatgtgtccttactagggaaacgtatgaaagagcaacttgaaggacaaggaattccggtagttcacgataaaacgaatatgggtgatttattagcgagtaaaaaatggaaatggccgcaatcatataaagcgtctcatgaatatgtaaaagaagcattagcacaaaataataaaattgcgtttccaattgatatacaccgtgacgatcagcgtaagaaagtaacaacaaaagtaattaacggaaaatcgtatgcaagattatattttataattgggatggaaaatgaaggccgtgctgaaaatgaaaaaattgcaagagcgatcaatagttatttagatgaaaactactacggattaagtagagggatttttcccaagtataaaaaagatggaaatggcgtttataatcaagatttatcgaaaaatgcgatgttaattgaagttggtggtgttgataatacgttagatgaattatataacacaattgatgtgttaacagaagcgtttagtaaatattattggaatgatgcggaaaaagtgaatggatgagggacgggagaccgttccttttttattttggaatcttaaaatgtgatataatggaattttatgaatgttaaataaagggagagagaaacatgcaaatactactaatacgccacggagaatcagaagctgatattttacatgtgcatgaaggtcgagctgattttgagttaactgacaaagggagacaacaagtacaaagacttgtacagaaagtgaaaaaagattttgcgccagatttcatttgggcaagcacattaaaacgcgctcgtgaaacgggtgaaatattagcagaagcaattggttgtccaattcaattagaagaggaattaatggagtttaataatggagtgcaagcaggcgtatcatttgaagaagcaaagaaatatccagagccaaagtttcttcatgaccgttttgaaaacggagaatcatttattgagtttcgaatgagaatagaaggaatcttttctaaaattatgatagagaatacatatgatcgaattgcaattgttgcccatggaggcgtaattaatagtctattacgtgcatttttcaaaatgccaatttcaatggactactatttcaaaatgggagatacgggaataagtttaattgaaattgagggtgaacaaaaaacggtgcatttcattaatgatacgaatcatttggacgggatgtaaagacttatgtacaaagttgtatttttcgatgttgacggtacgttattaagtgagattgatagaagcatgcacgaaagtacaaaagaagcgatacgaaggttaatagataaaggaattcacgtagttgttacaactggaagaccgtatagtttatgctcacaatttaaggaactaggtataaatacgtttatttcagcaaatggtgcacatataaaatgtgggaaagaagttatacataaatcagtactttcaagcgaaatcgttcatgatatttcaaattttgctgaattacatggtcacagtgtttcttaatgtgattataacagggtttttaaaccctgtggcaacattttggtaccttttttactaaatcttcttctataaatgcaattacttctgcttgttttgaagggtataggtggctatacgtatttagggttgtagccacatctgaatgaccaagacgttgtgctactataagtggacttacacccttgttaattagatatgatgcatgggaatgcctaaattcatgtaacaagattcttttaacaccagcgttaagtacatagtttgtatactttctatcgagagtgcttgctgatatgctagtataaaattcgccaaacacaacgtaattaattttgataggtgattttactgtagcatgctcttttaaatttttcaataaatcgattacaagagatggtaacataataattctatttgaggattttgtttttggttttgtaatttttctgttaaactctgttttatttatatttattgttttttcttcaaaattgatatcttcccaagttaaagctagtagctccccttttctagcaccgctataataaagtgtcgagaaaaaagttttatataataaatcgtctacactatcaataaattgatgaaattcatcaaactcccaaaaattcattcgtttattcgattccttttcgaaatttccagcaatgcgtgcaggattgtttgttaatccatgaaatttaattgcgaagttgaatatggaagagagtacagtatgaattttttttaaatggtctgcggaatagttgttaataattttattttgataatgcataatgtgtttggccgtaatctggtcaattttgattttgttaaattcttgtattaaatgattgtatattatatttcttataacgtttattgatgtgtgctttcgtctttggcaataccaatcaaaataactatctgcaacttgagcaaatgttaagtttgaatttgtttctttttcaactaacattttagcttcagcttcacgagcttccttttttgttttaaacccacgacgtttcacttgtttttgagtgccatcaaactgacggactctgacgacgaagaaatatgttcctcgttctttatctttgtaaatcaccataagaatccctcctgtataaataaagatcgataattcaatttattgagtagattataacttgtttgttaccaaaagaaaagacgctcaaaataaattgagcgtcttactttgacttgaaccactttaattttaataacatataacttaaaaactccccactaataatagtggagaagattggtagggaaaccaatcaggatgatacaagtaaggataaaatcatagtaccataataatgtcttgacgcatattgagaaattcaagcatttacttcgtgttatattgtaatatattttcaaattggtggggtgcaattattaaaaaatggctggtttctacatggattttagcagaatatattgaaaaatgaaccaatgctcattacgaatataaaacatatgaaactgcattcaaatattttcaacatttttctcagaagttatattgagaaataaattttagtgtggaatagaatatgagcccatgctaaaattagctctgtgtacagtaaataggtttctgtagaattaatagacagaataatcgtaaaaaacaaaataaataaaagcataaaaactcgcagagcgtgtgtaagaggtacaactaacaaagcctttcacactgttcatcctagctaacttaggacaaacatttgcatcatacgagttcttcgtcagtgtaacacacacctagtaattttaaaatgtgttctgagttgagaaaattaaggaggctttttatgttaccggatggagggaagaatactttgaagccgctacaccttgaaatttgtgaattaattgacaatagccctgagctaacatatgggagtgttgctgaggctattggagtaagtcctcaatatatgtctaagttcaaaaaaagtgggacaattagtttttgtagtctcttgaaattgtcgcaagtattaacgttgccggatgaaaactacaaaactataatgcgtgatttctgcttgaaagttgatacaacagaactaatcaaacaaagctttgagtacgcttcgattactagggatattgaattgttaaaacgtttgataggaaaatatcgaaaagataaaggaagtattcaggagtttgtggatgtttacgaaatactgtatcaatacatgctaaggcagattgatggggaatcactgattgaagaaataaataacttacgacaacctacagattgttgtttgcgaatattaattagcattatgaaatgctatggttactatttttctaaagagtttccaatgatgattgggattggcaaagaaatagagcagagactcaaacagttaagtggtggacgtaaggattttctccagcattgctatttttataaggtatacgaagtcttagcacctgtacatctacgatcaaataatagagatatggcaagaaaatatgcttctattattaaaaatgcaaacgttggtatcaaagctatttcagatgcatcatatataattggcatgtcttatttacttgaaaataaacagaaatgtttatcaatggtaaaagaatcatataatttatctaaacggattggtgatcagggctacgagaatgaggcgttttataatatgaaaatggtagaaatgtattatgctgcggaaacagacgggacggctagtgtattggctgacgtcgacaaatatgctcaagttttttatcaaaaagaaaaggaagactttattgtgttatttaaggcaatgcaagatatgtctaatgaaagcttacataaatgtcttcagcaattctttactcaaggcaattactttttttccagtctaagcgcaagagaattatataagagaggggaagattctgctataattaagtggatgatggattataaacaagaagtgggagggaatgaagttgaagaagagaatattgatattttcagtgatgttaactttaatgatgatgccatttgtccctaataagggattagaaggaaaggttttggataaatacactaattatatggatgttagaccaggcggttgaattatatggacccacttagtgaagttgaaaaagtgggccttttttatttgtcaatatattttgctaaaaaaaagcattttgttttttggctagtcttgagacatctataaaaattagtaataaaattataaaaaaggtgctaatttacaatgggtgatgagattattacttataggagagattagacaaatgaacaagataaatgttaaaaaaattaaacaggaaaacactgaagataaaattaaaaagatgttaatgttagaacaaatttttagtgaggatgaagaatacatacttgcagttagtaaaattaaagccatgattaataataattaatcatggcttttttcgtgtattttaattaaatcatcaattaattttataatgttttgttttgtttcttgcggcatattgtctagacgtttcatgagatgagcagtttccgaatttattttttctgtttcaagtgaaaggtcggtttgcatacccaataaatagtcgatagagacgcctaagacagtagctattttataagtgttctctcgtgaagggctctttctattggtttcgtataaggaaatcgcagacctatttacatttaaagcttccgctagttctttttgtgatatgttctttttcgtacgaatagactttatacgctctcctaacgttaccattactaacaccctccggttaactgaattaaacttttctattgattatgataactaaaaaagtataacaaagcaatgttttttaaagaacaagatattaaaaaaaagataaaaagggtttacaaagaaaatatatttagtgtatgatgttaacacaggtaacagatggagggcgaaaatgaaaaaatttaatgggaagaaactgtctttattaagaaaaaataaggggttttcacagagggaattggctcaattattaaactgtagtcattctttagttaatttaatggaaaacggaaaaatccagccaacaacctcaaaattattagggatgtcggaagtttttaaaattccaatggatgatttattcatcgattttttttaactgacatgttaacagtgttaactttatgttggattatgattgaaaactaatttaattagaaaaggaatgatatccatgcacaaaaacttatttattgctcgaaaagagcaacgtatgacgcaagaaacaattgcaaatttaatccatatttcaccgagaacatattttgctaaggaacacggtaaaagtgatttcaccctaaaagaagctcagaaactagcaaaatacttcaaaacaacagtggacgagctgtttgaaaaataaacagaaaaggtgggaggagcatttatgaaaaatggtaaaagaccaaccaagagagaaaagatacatatcaattcatataatttaaatcctgataattggctaatctttaagaagatagatggcgaattacatttagtgcatcgtcatacaaactcaatacgagtcattccaagtgcatagggtggtggactggacaagcattattaaaatttaggagggctttacatggatggattaacagtagcaaacgaactggtatttgaaagtaatggtgaggtagtaacggatagtttgacaattgctgagattttcggtaaacgacacgataatgttatatcagatattaaacttcaaatggattatgcaggagcagaattctcactcctaaattttgaggagtcaacttacacaaatgaacgtggtcgaatatatcccaagtacaatttaacagaagaagcatttacattagttgtttttgggtacaacacgaaagaagcagtgcaaacaaaaattcgatttatacaagaatttaaacgtatgaaggaatacatcaaaaaacagcaacatgtacctacagatcccatgagtattttaaagcttacttttgaagcgctagaagggcaaaagcaagaactccagcacatcaaatcagatgtcaaagacttacgagaaaatgcgccgttatttgctgtagaatgcgatgaaatatcaaatgcagtcaagcgtcatggcgttgcgctattaggtggtaaacagtctaatgcgtaccaacatgcggggattagaggtaaggtctaccgtgatatctataatcagttatatcgtgaatttggagtaacaagccataaagcaattaaacgtggtcatttggcactcgcaacaaagattgttggagcgtatacgttacctattgtgctgagtgagaaaattaatatagtaaactctcaaattaagttctctgagatgtgaaaaagttggaaggaggaaataactatgatggaagaaagtgttttttcagtatgtatcactgggtttctgatctgtgggcttttgcttgttgtttatgcactcgataaaccaattaaagaatttacaaaagatgtggaatgaatttgagaggagaaagcgctatgacgttatcagttttaaagaaagatgtacagaaaaaacaaatactagatgaattcttgcagcattgtgaaaagaaacaaatagaggcgattcaaaagaatgatccattgttactttgcatttggattaaagaagcacgattggctcgacgggagcttatagcgctataccgtgagaaagaaaaatatgataaccaacttgaacaggatcgtaaaagcattttagggattgtggaacatttaagaagtagaggcatcaatgcttcagccgtggagagggtacattgtatagcaaactattatatttaaaaacaagaagggatggtaaaaaaatgacagcagaagaattatttgaagaaaagaaatatttagtgattgcagcgatcaagcaacaatttggaagtatcgcaagagctgggcagattgcagaaataaacaatatggatttggatgatttaatacaagttggccatctgtatttatgggagcattgtatgaattatgatccagagagagtagatacattcaatgcatacgtgatgaaaggcatgaaatgggcaatgagtgatgagcttcacttgaaagggacgccttttaagataagcagacgagttggtcatgaggaacggaataaaatgaatattcattcgattgatttgcatcgagatgaggaaacagtaaaagaattttatgcagtatctcctattgatgtggaaaaagaagcgatattatccattgaatttgaagaagtgacgagtgtacttgaagaacaagaaaagtcaattattctgcacgtcggtgaagggtataccacagaagaaatagctagaaaattagagatgaaaaaatctactgttcaaacaagaaagacacgggcatttttaaagatgaatccagcttataagccaatcaaacaaaaatcctttttcttggggaaaagaatgataaagagaaaccaccagttggggctggtgatctaatagaaacacatgtccgtaagggttagtagctaccccagccctctcgggctaggatgctacacatttgtgcgcccgttcaaagagttccctgcacaatctcgtaaatataaagtcattctgacaattgcaagtcaaacactatctcaattagctttggatttcacagagcagtatatgtttactttactaggttcgttccgtaacaagatgatatttggtgatgtaacaccatatgatgcgaaaattttctctgacatgtttggtgaaacagaggaatttaaagaatccgaatccgaacaagggatttctcctatgcaagagaatcccgttagtcgcttaggttcgacatatcaaaaattaaaagaagtcgttatgtcaccaggagatattatggcacaaggtgccttcatttgtgctgcgcgtattgtacaagacaatcatgtgcaacctgtacaacaaattactagtaactttgtacccaaagaggaatttactcaagcaatcattcaagtagagatcaagtctggacaatattgggaaactgaacgtcttcgactcattgaagaatctatcgcaaaatcaaatcctatgaaacatgtagatgcaaataataaaaaacagatagaatcatttccacctatgcatggtgataaaatagaacaaaataattccatagaaacaaacactgtagaaaatgtaacttttcctgattattttaaggatgtcagtcaacagggaaatgttattgaagaaactgaaaataagttgtatgaagaaattaaggcattcgttattgaatcacaacaaatctcaccatctcttttgcaaagaaaattcagaatcagccatataaaggctgtaaaatttattgagaagttagaacacaatcacattgtgagcacttacaccgggaatagccctcgtaaagttttaatttcaaacaataataatacgttgatattatcaaaggattctcaaatcaatactactccttcatctaatacagatttagataatacgacttcacgagaaaatagcattccaaacgaaaaatcagaagcaaagcaagaggaaacaggcttctttaaagacatcctatatgatgatgtagtagcctttgttaaggcatcagggaattcttctatacatgcactacagaacgcatttaaaattgattatacacgtgcttcaagattacaagatgccctacaacggaatggcgagctgccgaatataacaaaagagacacatagggaaatagtaggtcctaaaaaaaatatggagctagcagaacggaagaaagaggtatctaatactatgctggaaccaaaaagggatatagattacccaattcatttaggaattcctgtagaaactgatccattgcaaaaaaagcttctaacagagggacttataaccacagtattagaggaaacaaaaacagatatgaaaactaatttgaaaccagctacaaaaacagttaatcccactaaagaaaataaacttgatgaagaggttgcaaaagtttacgaatctattagcattactgttcatcaaaacttagaaaagaatatggtagagaacactagaaataatgaagagcagcatgaagataaacatatcgactataaagaacgcaaaaaaaacttaaaagccaaacaaaagaatacgtataacaatacaaattcactacttaataaaaaccagcaacaaaagaaaaatacatctaatgtaatgagtaaggaattagatgatttttttgattaatacctatagaaacctaaaataactttttattcaagattatatttttagggaaaatctaacttaaattaggaggaaaggttagatatagtattttaacttttcccttttcaaaaaataatacttgcacaaattacataaaaacgttatattttaattaataattatacaaataaaacatgacttacgtgaaggacacaccttacgtaccattccaacggtacaggtgtgtccttttttacgttcaaggaggaaaatataatggttgaagataaggtaaatactcatattacaaaagaactagggatggcatttgaaccggataacacgctagaggacatctttatagaatcaactttcaatcaatttgaaagaatacgtgaacatgaattagaagaattagctcgtatgaaacgtgaacgtactgtagggaaaggcttaattacaatagtatctgaaaaattattcccaactaaaaacgggacatctgagcggatacaagtgctcacaatgcaaattggtactcatacgacagcatattgtccacttacagaggcaggtataaatattcctaaaaatcctcaatggctgataggtaaaacaaaacccgttattattgagcatttccaaagaactgaggaagggaactttgctgttgtatctatcactgcaggagaacttgcactgcaaagaaaattatatgaagaaatagtagagcaagaggggaataaagtatacacaggaacagtttctggacatattccatctgcacaaactattctggttgaagttcatggtgtaacagtaggagtaagatactcgcaatggtctcattcattcgttcgttcggcggatattattattggcgatgttgtagagcttatcatcgataaagtagtggaaaaggatgggcgctatgagtttagaggaaataaaaagaaacttgaaacggatccaatggaaaaactattagaattaaacaaacgacgtgaccgctttgtaggtaaaattgtaggtgtagatgctattgctgggattttcgtagaagttgcaccaggtattcaatttaaagggttaaagggtcgtaatctggcaaatccaaccgtggatgacgcaataaaccaaacaattgttacatgtgagctgcttaatattgatgctaaaaatagaagaggaactgtacgtattctaaattatccgcaaggccaaagtaaaaaatctaattcgtcaatttaccaattttaatagatgattatgcgtacaataaagaaacaaatgtctacttatattccttctattcctcatttatcaagtgaggatgtacaaggacttcaaatatatcggatacatgacttggataaaacctatgtattccactcttatgacgaattagttaagtttaagcagcttttaacagaggaacaatatgctatactcaatttcattggtgttcatacatctgttcggtttaatcatttattatatctattcaagaataaattttcacggaagaaaattaataatgcacttcaaggattactttactatcaatttatagaaaaatggcaagtagaaatttttgatatggaaatctttgaagaaacatataccttatccaataatggatttaaactactaaaatactggcaagggaatatgttcttctttgcaccagagcgtcttgacaatcatggtaaatatgttcacctacgttattggcatgacatagacctactttgtcatttacgctacgctccttcatttttaggtcatattatgcatccatctattagtaaaggggtttttaccccttctttaagttttatagtaaatggaggaaaagaacgtaaatttaactttgttgtatactccaccttattatctgatcaaaaggatcgattaaaacgaataattgctagatggcagacttttgtagagtcaggaaaagatgttattatgcaggacttagggaataaccctacaatcttagttatttatgtttctactaaaaaacaagcaaagaaaattaataatgaactattacttgatttaattcctggtaaagtattgttatgcataggggaatctttacattttcaaggattacaacacgctttttatcaacctcttgcagaaggggagattaaacaattagatacaaagctatttaaagaaaactaatccaccttacaagctttcgcttcaagggtggcttgtttattttataattagcttgaaatattcaaaaaaacttaacaaaattaataatcctgtatctacctctatacaaagcaaggattttgcgaaataatattctttgacacctgttaataaaataacattatatacaaatatagttatttcattggaggaatatacaagaaaggagtactatattgctacgtatacaaagagggtacatgtacgatcctgataataatgaggtaatagtaaatgaaattttctatgatggtacatcagaaaaaaagttaggcagtaaaatggggatatttgatccagttaaagtacctattgctatttttgaaaaggtccaggaaaacgaaagtatgacctatatggaaaatgttgaagtagaagaaaaaaatattaaggaaatactttgttatttagttcaaaatcaaaagcccgaaaaactatattttgaaatacagtacatgaagtaacaccagggcctgaatataagaggggatttatagcaggggaatcaggggcattattatacaatacatgtgggatctgcatataaacttccttcttatctctgttctattgaaaacaattgaatataatataaaaatggtttaatataaatctatatttattgtttaattgattccgtctattcccacgccctatgtgttgtggttgagttttagaaacaagttatatttttgtttcaattatgaaagggcttctttgagccgattagtgtatatatagcttattttgctatgcacattttaatcgacttgaagaagtcctttttgtgttgtcttcaagttaggaatcacttatacataaacctttaggactaaaagtatgctaaatgagaaagtacaaattttgtgctttttgtttaatttaggggagagattatatgaatttttacagagtatagcataaaaaaatatggataaaacgcacatatttcgtgctttttatttagaaaagaggatatttatgatgaaatatgaacatgcaattactttagataagccaacattatcaataggggaaatcatttaaaactttcaaaagaaaaattaattaacacgttaaatgttatgaacttactatctataaaatcaaacctttatattattgtaaatcccaaaatttaactattaggtaaggtaataagaatcaattcatactgacattcgaaagagaagaacaagggaatctaaatatgtaaagtacttgttgcaatgctaaaagcacaaggaattagaatatgaaacttgagaggagttatataatatgattacagttaatcgaggatacatgtatgatccagatgataatgaagtcttaattaccgaaatttattatgaagctgctacagatactaaactaggaagtaaaatgaataacttatcttactcatccattcctaatgagattaaagaaaaaatagaagcaactgcttcattatcctatgtggaaagcattgagatgtctcagccattagctgtcgtatatcaaaatgaaattaacatgtatggaaaaccagaaaaattatactttgagtatacaaacatttaaaaagaaaaaagacattgaacagttggtttcaatgtcttttttccttttaaactatagagaaacaaatggttaaggctttgtttggcatcctatagtgttttaggtgtgttatacttatatttataaattgtaatattacgtagaatgttaggtttgtttgctactattcaatatatataactggagggaaaattatggttttttttaaaaaggcagtatgtggtgtttgtgatataaaggttggtttaaatcgttataaaatactaaaatctgacgcatggctatgcccagattgctttcataaagcaggtggcttgggtgttgtaagtgtaagtacggacactatcgaagaattgaaagctacaatcgatgcaaaggtagcaaaacttgctgaggatccattgtcatgcgctgaaggaatgtatcaattctgtatagataatacattcggttctggctttaatgaaaagtggggtgtaaaacacttcaaggtattagaagataacttgatgaatggcgaaaaaatacatatgacttatatcggaatgcacgattatcaatctacaacaaagcatgatggttattatgcctacgccataagtaataaacgcattatgttcggacaaaaaacaatgactggggaaaaattcaaagcagtagatcatgaaaagataaatgatatatcttttgaaatagggatgtggttaggctttctaacaattgatactccgcaagaaaagatcaaagttgcgttagataaagattcagcaaaatccattaataatcatatccatcaagttctagatgctttaaaaagcaaacctactgaagctcaaccacaagcagtatctgctccaatatcaacagcagacgaattaaagaaattcaaagagctatgcgatataggggttattacagaagatgagtttaacgccaaaaagaagcagttacttggtatataaatacaagataaacaaggcaagtatattagagggaaaaagacattaaacgtatttgttcaatgtcttttttattacactgcagagaagcatgtataataaatattgtaaatgaaatagaaactgcaccctatacgaattattgactaacctagagtttctttttagatgacagtttattaaatttttagcgataaaagccaataatttaaaattgagacatcctatttcttataatctgactaataatttttgttacctaggacaaggataccaaggtgctgaggaggtactaagaaaagtacgaattttcccaaagttatcataaatattgcgtggaatagtccacgtgtgcgtgacagtatagttctttaacctagaatcaggtgatacaatatcccgccattcagtaaggaaccctccatctttggttaaataaagaatcttaaaaaccggattccacactacttcccccaagagggtcctgttgttatttaggatgtatgaaaaactaacttgactactcttatcagaatttagcataactgtaccagtaacgttagatatagacataaaaacatcgcttttatccccagtactactgttgaatacaatccagcctggggcaaagtatattttagttaagcggatattatccaattcagcaatttttaagactgtgtcttttggttcaaatcccataaaatatcccctctcatccaaaaatatattcattgtatgaatgtatttttgtcctagtaaattggatttaactatttttaaaaattaggtagtattactactttacttaaatctaaaatacataagttgtcatgaacgaattattattttgaaggagatgaaatattaatgcatatagttccgtgttgtcatctacaggtatatacatcatttacaccaaatcctatgcagtatattccatatgggtcatggaatacttttgtacagctcaacccgcaaccactacctcctggtacttttgtagaactcaatccacagccactacctccaagatatcattattaaaaacaaaggctttctaaaaaacttaaattgcggagtacatctaaagaccactggaaaggtaatctttagatgtatttacatacagaacattgcttcatatacaactacagaggaacaaagcattctattacaagtaacccctaatttaactttcacttacctttggactttcgtccttcatcaagttaaggaataaggtatctgtgatgatgggttctaacaagacttcaagaaggtttacaaatgttattaagcattgaaggacgttgggaaataagggcacaatatgaaaataaatatgtaatagtaaggagaagagaagcgcatatataatatacttaaacgtcaatataattctattttccaaggggtgatttggattaacgaggaagtacaaagagagctaaacctattagtacaaaaaatttgtgagaccgtgtcttctgtccaaaaaattatcctttttggctctcatgcttatggtacaccaaataaagatcgtgattttgatctttgtattattgtggatggtgtaggaacaagaaaaagagaagtgattaatcttatcaattggggtatttacgatgtgatggaaacaccagttgatattttagtatatggacctgaagagtttcaagaacgtgctaaccgtaatgtaaccatggaatacaaaattgcactaggggggcaagttttatatgaaaaatactgaggatctagaagagttgctattcattgcaaaatctaatttagattctgctaggtacttaactcacatgaaacctttccctgcctcagttatttgttaccatagtcaacaatgtgttgggaaacctctaaaaggatttcttacactaaacattagaacagcccctaaaactcataaccttttaatgctgcacaaattttgtcgtaaattagatgaggagttctcattgattttagaacaatacgtgcagctgaatggttatgttacaaacattcgttatccgtattttgaagcacttactgtccaagatggattaatggctcaacatgctcaaaaagtaatgagtttctataatgaaaaattaaacaagctaaatatacatgaaattgtgattgattaaaaatagaggatatgcataagagagggttcctatagcaagggactctctttttctatgtaaaaaagaaggggcaagttttataatgatgaatacttatagagaaattaaagaggaaatgaaaaaagtcaatttatctcgagattgttgttttgtaggttaaagtggggaaaagatagtccgttgtcactattatgtaatacaattgctgagattctgctagagaaccgtacaaaacctattgatatcttggcttcctaggttggagtagaaacacttctatgattgctgatatctcactgacattacaaaatatctaggctaatacagatatataagcagctaatcgcttgtttatacacttctaaacctctcgtgataacagtaattaagagccttgcctaataagacaaacaatgaatgtatttcgcatttgctgcgccaagatatgtctattcaacccttcacgttttaattcaagtcgtatcatcttttgtattgcaacctcagacaaagcctttggcgcatctttttcgtaaactcaacgatatgttccctgattaaaattaaatgctataaacaaaggattatctgtataccgtctaagccttacatgttcaggaatagttatatagtatttgtaaagatgctttgtatcttccttggttaaggaaacagacctagttacaccattttctcctggaacaattaaagagcaagctgtatatggctcatattaagcgatacaagcccttgtaaggacaacccatagtttactactaaatttattatagaagcgtttctatccataataagagggcgatattcaacgtgtctttctgttaatccttttgttgaaagggtagtttgttttaatagtttttcttctgcttcggtaataaaatccttatcacttagtgattgatcaggaatttatgaggggtgaaaatcatctactgaagtatctatcgctaaagacatgttcaatttatttaagaacggccatattctgtgccttgttttctagcgcatagaaatactcctaataattttctttaggtagttcacttcatgatttgatatctaggagcttctcatttgctcttagtcacttataaaaaccagtaatatcgtaattataacgttcaatcctagattgtttacgtccattttctgctaaataaacagaaaacgattctaatgctacttctatactaatacccttgttctttataatcacctaaattcttatcatatattataacaaaaaataagtgaaagacctgctaccgccctttgctgcgctcggttgctggcatataaaaaaggaaaacggacaaacaacccttttccttttttatatgttgttttttattttcaatgacaaaaagacaaatctagtcctaataaggattcatagatttgtccttttacatgggagtaatgatatgtttaattaccattattataacggtttttacaaatattttcaattaggtctgacatcttattaataatcatattagtaattgtaaaatctattataaatatatatcttatatattaaaaagaaataaagataaaactattataggttatcaaaaatagggggaaactctactcccacaagggaaaatttgatgttagcacgtaaaaaatcataaatagtaaaaaatgtatccgtagattcaataattataagactttcaattctacaaaaaagcaaaaagaaaatcatatgtttctacatgaaatcggaaagaaattgatacaaattactttatatttattcaactatggaaataagcttcatttactttattttggtaaataagcagtatttaacgttcaattatccacattttgttcagaaaatgtagttatttgttaacattactcagtatttacacataactcacattattattgatgatttttattagatatatacaacaacactagtagttacaatgatgtcagaaaaatactattcacattcgagtatatttgtcctcatatccactgtttttataattttatttttgattttttgtaggtattatgaggtatgttttattacattagaagaatactccctggcactatgtggagagttatatagtgctagaagagaatttgtatagaagtgcataaaaaaagacttcattttacatgaagtccttctgattttgtatttataaatagagtagtagaaaaagagtatgaatgaaacaactacgaatagccctctaatttcgattttttcaaaaatagagagctcgttactattattttatttccattgcgtgtagcacctgatctggagctgttattgttacaccagcacgtactaagcgttcgaaggtacgcataaactctagtaaattaaactgttttggtagctcaatcacacgcagttgttcttgtggtagtttatcaattgtttcaataaaccattcacgtacatcacttggaattgtgcgttctttatgaccacgaacttttagtttttcacgcatttcaatttctaaagcgatatatgcatggagattcactccctgatcatatgcatattttctaaataacgtttcttcctggtattttatataattacggtgataagattcttctgttactggtaccgcaaacttctgcttcaataatgcatgcacatttttaaacatctttttaatgttacgaagagagtacatagaataatgtaggccgaaattaaagatagcttgctcacgttcgctatttctctcttttggtatatgctgcgcaataagagggtagataccttctttagctgctgtatcgagaatttgatattgagatgtttgatgcaatagtttcttcaatgtatatacaattttcgttggatatccttcttttcgatcaaccatgtcacgtagtccgcgaatgacactgcgaatttgacggtgacaagtatgctttaagacatgaatgaatttattcatgtctgcagacagttcaccgatattcatctcttgtaggactgcttcgataaatttcgcttttcgagcataggtagcttttggtgtaaatggatccctatgttgttcttctccagcttctttcgaacataagaagtctgaatgtatagacagatataatgttgtatatcgttttgtatgctttacacctttttgcattttgcaaattttgaataggggattccccgtacatggtaatgcagttgttaattcctcgataaccgcacggatctgatgcggatattttttatgtaagaaacgatacatcccaccgaagtgagttttgtttcctctttcgtcctgcttgtctaaagaacgctttaatgttgtttccgtatgttgttgcattgcgatgtctaagaatagtttcttagctgctacagatagcttaaagaaatcctttgtaaatacaacaggactaatatatacgtacggatttgctttttctgtttcctcattcataaaatgagtgagtttgattgtataacggccatctactccattttcgatggagataatgttatgtaagtttaatttctttaatgcgatatagaattgagagtgttggatataagcaaattcttctttatattgcttgtaatcttcccacatcatatgtatggttacatttggaatgacgccgtttgtatagcattttttatgtaagtacaagaacacttcaagatcagcattcgtaataccgtataatttatgttttcgtcctgctttttctgcaagtgtagacattgcccgacgtgaaaaagatggtttggctttttcaacaaaaccttctacatccgcaatacgctcttcgtatgtcatgtgctgcaaaatatcttctaaatatgtatctttatagctgtagtatttctcctcaaatgtttccacaaacttttgccaagatttgagtgttactaaaactgcgtttgttgttttcccatttaagctacgttgattacgtatcacaaatgattttcccatctttttcacctccgttctacaaattcagaaatatatgtcaaaatactataaaatataccaattttgattatagcaaatcgaaaaatgatgaaaggtgctcctttaagaagaaaattagcaacttgcaacagcttatgaagctagttgtatcaagggataagagaatttcatgatttttttttgtgttaaggataccgcaaacgtgttgcaagttgtgtgatatgtataaaagtaagtgaaaaagcacctaaacccttggtatataaaggattatagtgaaaatggtaggggagttagggaaaggataccgcaaacatgttgcaagttagtgaacgtaatgattaaaaatgaattgtaataattacccttgatataaaaggacttgttgacatttatagaatgaaagtagggaaaggataccgcaaacactgttgcatcttgtgagaaaaataagggcatgcataccgcaaacgtgttgcaagttggatgatatgtataaaagtaaatggaaaagcacctaaacccttggtatataaaggtttatggtgaagatgatagaaaagttagggaaaggataccgcaaacatgttgcatattatgtatgtaacttataaaaaatatgagaaaaatagcttgaaaactttaaaatgacatgattttttttagaattacttagttgagaaataaattatactgttgcaagttgaaagagatagggaaagaataccgcaaacgtgttgcaagttgattagaaataggtaagagaaagagcaaacgtgttgcaagttgagaaatataaggcaaacaaagcgcaaaaagaatgtaagtaaggagaaagaggtaagaaaaaaagcaacctgttgcaagttgaagagttaaggaaagcaaggcgcaaaagaaatgtaagaagaagaaatagggaaaagaaagagcagcatgttgcaagttaaagagttaaggaaagcaaagcgcaaaaaggatgtcagtaaaggaaaataggtaagaggaagaacaacctgttgcaagttgaagagttaaggaaagcaaggcgcaaaagaaatgtaagaagaagaaatagggaaaagaaagagcagcatgttgcaagttaaagagttaaggaaagcaaagcgcaaaaaggatgtcagtaaaggaaaataggtaagaggaagaacaacctgttgcaagttaaagagttaaggcaaacaaagcgcaaaaggaatgtaagtaagaagaaataggtaagaggaagagcaacctgttgcaagttgaagagttaaggaaagcaaagcgcaaaagaaatgcaagtaggtagaaataaggaagagaaggagcaacctgttgcaagttgaagagttaaggaaagcaaagcgcaaaagaaatgtaggaagaagaaatagggaaaagaaagagcagtatgttgcaagttgaggagttaaggaaagcaaggcgcaaaagaaatgtaggaagaagaaatagggaaaagaaagagcagcatgttgcaagttcagaaaagaaagttgcaaaaggaatgcaagaaaagcagaatagagaagaaagaaacaaaaatttgtaaatatctgttacaataaattaaatataatagtagttaagatttttatactgagaattatttaattgtgatccatggtttagggaggaaaagaaagtggataacttattacaaatgtttcgagatgcattgttaatctctgagccaatttataaaactaacgagctagtatggaataagtggaatgcatattttaaagatgttgaaaacaataataataaagtactcacatcacctcatgcttccccatcatttactgcattagtgtcttggctagagaaaaaacaagaatccggtactacattagtacaaatttatgccaaaattgattcctataaggaagaaatatataaagaaattgaaggatttatagacaaagaattccaaaatatagcttcttcaagttccataatagtagaaaatgatcaaaatatagaagagacaagtatagtaaaccatgaggattattatgaggtaaataactctgctgtttattataagctaagagatgggattgcaaaaaatcaatttgaagaagatgaactgagtaaggttttacaatatcctattgaaacaaaatcttctaatggtgtagcccagctttcttcacacaaagatgaagatttaagacttactaatatagaagaagcagctcgatggaatactcttgttgatgatgtaatgagtaatatggatgatttaacggcagattgtttagatgcaattacaatacaatggataaacgaagcaaaatctccagacgaattcattgatttttcttatgagcaagttttagagatgtgcaacattccaaaaacagtagtcaaaaataaggaatactatagagcggaagataaaattaaaatagcaaaaagaattgcagctttagcaagtatttttatctatttaaatgatgagaatgaagtcgtagtattaaatgaccgtgaagatgaaggggaacgactagaattaaagcgtgaggttgttaaacgattatttgtattagattcggttgtattgtggagacatagtgttacaaatgaatatatgggtattgaatcttgtcgtattaagccaggcagctttttaaccaattatttatacggatcaaataatacaacagcattattgtctaaaaaagcacttgaatacaatagttatagacacaaatatcataaaaggttaatacgatacttaacatggcaatggagaattagacaaatgtattcatcattgaaaaagccatattctataggtggggacaaaggcctgctagcagtaatggatatcccgaaagattggaagcctaatcgtattagagaacagttagaaaacgttctaatggatttagaaaatgaaaaagtaatctctcattgggagtatagtgatccactggatgaacaacaaattgggaaacgtaattggtttaaaaattattacactaacttaggaataacgattttgccacctgaagaaatgttacagtcaatggatagggtaataggaaagaagagtatagaggaaccacaagagcagttaccggaagtaacagttgttaaagaaataaagaagactgtagaatcagtcgaacaaatagagaaaaagatccgtgacaaaatactgaaagtacacaatgaaaaaaaggtaagcattcgtgaaatagcagatgaaatgagtatttctccgtctacattatctaggttttgtaattataaaacaaaacgtttatctaaaaaagcattagaaaagctaacaaaatggtgtgaaaggcaagaaatattagaaaagatgtaacatagactaaatatttcttttaataatagtcaaagtaaaatacacatacattatgtatgtgtattttacttattattaccaataatagtctgaattttctttattgatggtggttttggcgggcgaagatcctactggaaagtcattatagttatgctgtttaatccactgcaattaaatttcttgtcttatcgatatggttcagtaacatacgatattcttcttcatacatattgatacgttgtagaagagattgattctctgtttttaaatcttcaatttgattttgtaattttgtcaattcattcacatctttataattttgtagaaagagaataatatcatctaatgtaatagacaaagagtttttttctttttctgatggggagaggggaatgttgtttcccatttttcggtcttgttttgctagttgtatttcttcttggtattgttttctcacatatgaattccaacgaaatccacaagctgcgggtgttctagctagtagttttgctacttctttgaatgcagctaactgtgttccaccgttacgaatattctgaagtactgttgatgcgagaagtaaatcgttatcatcagtccaggaatcttgtcttgagattaccacgttttaaccccccttatatgttttatattatatatatgcaattactcaaaatgatagaagttcaacttctcttgaaataattgggagtaagttggtagaagtatgtatgattttaaatgcaaaattgcatttaaggttgactatttcacgaggtgtaactatactggttacagtaatgcgactgaattaataaagttgttggtatgaattggttgtattaatgatgtataaacaaatattaaagaatgaatggagttgaaaatatagttctacatataaaacgtttgtataaaaagaaattaggtaatatacatttttttataactatatactaataagaagaggtgcatgttttgaaaatttttaagggaattttagtttcttcaattgcattaacagcatttaatggagtaggcagtatacttccaagtgaaaaatcagaagttgcctacgcagctacttataattattcaaataagcaattgaattctactgtacataagcaagttactaaacaattaattttaaaatttaaaaatgaagtgaatttaccatatcaggatggaatagaaaaattcattaaagaagaaaaacaagatcctgaattaattagaattttagctgaatatccaaatgtaactataaatcgactttttaattctttaaatcctaaagaaattaaaaatctaggtaaagaaataaaagattccgatcatatttcttctaatttgctaaactattatattgtagaaactcaagatgatattgatgtacaagcattacttacaaaatttgaaaaatcatctcttgttgaaacggcgtatttacaggaagaagaggcgccaccagcagagcgtttgccaaacttatctgttaatccatatgatgagcctagacttacaagacaaggttaccttgaaccagcaccattaggaattaatgcaccttatgcctggagcataaaaggtggagatggaaaaggaactactttcgtagatatggagtatgggtggttatttaatcatgaggatttagtgaatcaaaagattgaactgatatctggacagaataaaagcgagcaccatgatcatggtacctcagtcttaggaattgtttcggcagaggataataatataggtggaattgggatcgcaccgaaagctaaggtaaaggttgtatctcagattagggataacggaaattataatacagctgatgctattttaagtgcggttaacaatatgcaagctggagatattcttttactagaggcacaagcaacttacgatggatatggagataagaactattttcctgtggaagtaaaaccagacatatttgatgcaattcgtatgggaacaaataagggaattattattattgaagcaggtgcaaatggcggaaatgacttggatcaatttagagaccgtaatggtaaacaagttttaaatcgtaatagtcctgattttaaagattcaggggcaattatggttggggcagcttctgcaagggttcctcataagcgttcatatttctctaattacggtagtagagtggatgtgtatggatgggggaatgcagtagatactacagatgctaaaccaagtgaatttataacaaatttatatacatctagttttgctggaacatctagcgcatcacctattattgctggtgctgcagcatcaattcaaggaatagcaaaaaataatcaggggagagtatatacaccaagtcaacttagggatattttaagtgattctagcaccggaacgaaatcaaatgatccaacttctgataaaattggtgttttacctgacttaaaagctattttatctaaacttggtttttcaccaaacttaggtaatgattcttccattgtatttcctgaggaacaagaaataaataaaggaaataagggaaatgaaggatctactattacattcccgaaagaagataccgctaatagtggagaggactctagctttattttcccagaataatagaaatacctcctattaagcatggggcaaaatagtttactcaataagaacaaaggatatgaattcaatagaaatatgaatttatatcctttttattttaagctgtttttactaccttacaaaaacgtaatgttagcgtaatggaaatgaattttggcagccaatagattaggatataatttttgtgagaaaagatatgaggtgaataatatgaaacgaatagtgcttatgtgtagcttttttgtgatgtttactgtgttgttatccgggtgtaatttaaatcgtcttggtacagatacatattatgtgcaaattaccaaggatggtgaaaaattaaaagagaaaaatgtaaatggggatacgacttacgaatataaattacctggatttgataaggatggtaaagagaaagaaatggagtttacagcgttaaaaaaccttcgtaaagaagcgtttttacgtatatattactctgagaaaaaaggtgtgaaatcttgggaagaagtgaaaaaaggtgaactccctacaaaggtaaaagaaaaattaaaggtggattaatatataattctttatcattttagccaagaagactccttcctcaaggagcgtgaagggtcacagtccagtgagtaggtgggagatgaattgggtttgaacaagggatggcgggaagccatcttaattgttcgacatatagaaagtattactccactatctatcgaatgtacgtttggtgtataatggtcatataccgaaatggaggtgaatcaaataatgatgaataaagcctataagtttcgtatctatccaaatcaagcacaagcaattctaattaacaaaacgattgggtgttctcgttttgtattcaattatttcctatccttatgggatcatgcatacaaagagacaggaaaaggcttgacctatggtacatgctctgccaaactacctgccatgaagaaagagcttgtttggctaaaagaagtggatagtattgcgattcagtcgtccgttcgcaaccttgcggatgcttatacgcgcttttttaaaaaacaaaatagcgcaccgcgctttaaatctaagaagaacaacttacaatcttataccacaaaacaaacaaatgaaaacattgccattatagggaataaaataaagttgccgaaactaggccttgttcgatttgccaaaagtcgtgaagtagagggacgtattgtaaatgctacagttagacggaacccttctggtagatattttgtgtcacgattttgtacatgcttaaacaagcgaaaatgtacatgtttatcttgacatttacaaagagatgaatatatttgaattttattaattaaatccagaaaaaaatatcagaatagaaaatgctttaaggcctatttgcagttgaatatttatggtatgaatattgccgtatttcttagtatgctaaaaatacaagcctgtaaatcactttgttatgactgtaaagtaaaagaaggatattgaactattttattatttataaggtattatatatactttgagattcagaaggtttgaataagttacgctttatatgccgatattttggttcaactagagtatcaaatgtggaatatttctttgctatataaaacctttacttcttaatcttatataagcacaaagtaaaacataaggggatttttgaaaaaagagtattatggtctagtataaaacttgtattttagaactttaaatatattaagataattcaaaggggaaaataaaatccaataatcattaagatggtagtttctttggattcgtttcttaaaatatctatttttgattttccttatctattttgtaataaaacttttcattaatagatgaaaatatgtatgctttattaggaaataattaaggtatcttttaattatctataattatttgttatagaggaattagataattgaagttcttttcatttgggaatacggtgataaaaaaggagggacggagttataaggatcaataagaatacataattaaattgttttacaataaaacattccattctcattaatattcttataatcacaaaaaccaaatgctataaaatggattgtttgaaaaagttgtgaatatgcatatttttggatgcgtgtacaattataatcatcatgatatcacttctcttttaagaatgcgaagttttgtcgttatgtaaacatgggtgctcaaaactttacattttttgtacaatataaaatattaaaatacagttgtacagataattgatatttctttatatgaaaaaatgcttataaatactatgcaaagctaacgtataattttttagaccttatagaatcaaataagaataaagatagaaaataaaattgaaatactaaggctagcaaagtaacgtgaggtaatagcatctattctgagttttgtagttaaatgttacctagtgataagtaattcagtattaagggaggagaaatgtaatggataaatttattacagacttaatacaagataaatcaatagtacgacaacttcaaattttagaaaccttgattgatagcaatgaaataaagtcttccaaggatttatcacaaagtttaaagtgtacaagtagaacaataataaatgacatttctcagttaaaactagcgcttcccgaaaattgggatttaataagtgttcaatccaaagggtacctattaaaacgtgatttttcaaacgatttctccgaattaattattccctatttaatgaatagtgaactttatacaatattaatcggtatatttaatcaaaaatattattctttagaaaaatggtcccagttgttatatctagataaaattacactaaaaaaaatgctgaaaaactttcggaagatacttgtgaactttggattggattttaattttagaacgattaaattgattggccaagaaataaacttaagatatttttatataatgttcttttataatatccaaaagtataaagaagtaatcaatttagattctagattacaagaaaaaattaaaagcattactagaattcacaatgtagaaatagattataatatgctagcagttattattagtgtatctataaagagaattgcaaataaacattatatgtcagaagttttagagtttcttcctatacttgatacaaataatttaaattgcataagttcaattatatgcgaattggaaattttcttcaatataaaattcacagaatatgaattaagttattttaagaatgctttttcaataatattagaatggaacattgaagaaaaaaataggatcacagattattattataaaataaacaaaaagacttatgataaaaacaaacatttattccaaacaatatcttctgaaataaatgtttgtttagaaataaaagaaaagataaaacatgacttgtatttcattttacataaaatttacaagtttcaaaagtatggtttatcaataggcgcttttggtaatgaatttgacactgtacatcatgaattttcagaaggacataatagaatttatcctcttatttcttcttggaataaaaaaataaataaaagtagattaactaacgatgagatcaattacataatataccatattttatttattgtccattcaaatcataataaaaaaggattgttattattatctggttcatcagctttaaagaagtttatttattataaactcaatcacgagctaggtgattttgtaacactacaacaaaaaccagattgtatgcataaatttgatgttattctgacaaattatcaaatcccgaataccccaatacctataattcggatctcaaacaaaacaattcaaaaagattcaagttatgttagaaaagttttatccccttttaactaaacttaaggttttagttctaaataatgtatactttccttgtatggaataacttatatgaaatcgatactagaaattgataacatgtatttattttcaattgaagaacagaatacttataagacataattgatttttacgtattgtttgaaagaattctcttaccccaagtgcgtaacgataggtaggagattcttttggtttggcttagccaaacagcgcgtaattgcattttttattttctttattatgtaatcagtcatgcataatgaaaattttgacatgtcaacaaaattggattttaagaacgattaagtgttcttgttatactaccaatagtgtattgacgtgaaatacataaatgataataatttatcaaactatgcagacttatttttcaggttatccgtgaattataacataacactgctagtttagaattatgctgttgttttatattattaattttacatataacgattaatgcttttgaatgcaatttctcgacttaataaattagattttctcaaagtgcaaaaacatccattggtaaacaccttctgcccatcttaactaaatatgaaaaaaattgtgcaaaaagaaattgaaacagttataggattatactttagttttgaatataagaaaattaattaggttaactacgaatttaaatgttacagctattgaaggactaaaaatgaaagatatgttgcaatcaatttatcttagaaaaaatgacactgataacggtaggggaatgtttaccttattttagtttttaaactacacgaacaatgaaaataatgtgtaaaaattcacaaatagattccctctacaaaaacatgtggcagctgcgagaggaatatgtaattttcagaaggattatatttttgtaagtacggtgtaactttcaatagagtctgtaatgtaaatatcaacatcaaagatgaaccaatatttttatcattttagccaagaattctctttcctcaaggagcgtgaaaggatacagtccagtgagtataggtgggagatgaattttcttcgaacaaggggtggcttcctgccttgaaaaaagagcttgtttggctaaaagaagtggatagtattgcgattcagttttctgttcgcaactctgtggatgcttttacacgctttaaatctaagaagaacaacgtacaatcttatacgacaaaacaaaccaatgaaaacattggcgttgtaggaaacaagataaagttgccgaagctaagccttgtttgatttgccaaaagtcgctaagtaaagggacgtattgtaaatgctacagttagacggaatccatttggtagatactttgtgtcattgttagttgaaacagaagttggtgaaagcaaagcgtgttctttctagaggaatgaaaggatcttcccactagaataaacagcgagtaaaggtagatagaattcatgaatatatggaaaattataaaaaacattacctggacaaaagctcaactgaaatcaccaaaaaccactatgttgttggtataaaggttttgcaagtatcgaatattttaaagaatcataagttagcaaaagccattaatgaagtatcatagtcgcaatttcgatccttgttagaatacaaagcaaaatggtatggaaaataagtcattgttgtatcgaaaacatttgattctagccaattatgttctcattgtgaatatcaaaacaaagacgttagaaatctagacctaggtaaatgagactgtccttcttatcttacacgctataatgcggatattaactcaataagccataaggcttctaatcgcaaggactgctggggtagttcaatagctctggtataaatagcagtaaaataacctttggtacaattcgatagttactagacgtaacgattagccgagaaatccccactttagagagcacgttaggaggttaagtgaagggtatttcacaaatgatcgattatatttataggaaaaggatagatcacttcatctatagatgaaattatctatccttttatttgttagataggagatataatttactcatagccccagagaaagtgttaacaggtgatagcatccaattttatagtaagggaggttttactaagttctaataattttctgggtaattagtccttacaacgacttacatttaggaaattgcctgttaataaaatttatatagtaaaggagtgctttaatgtaaaaaaatagggataaatgaatttttgtgaataggaagaccatttgataggtaaatattataattcaaaaagtagaataagcaaaattgagtaacacattaatgatataaactaattttatacaattgaaattgataaaaagttatgagtgtttaataatcagtaattaccaataaagaattaagaatacaagtttacaagaaataagtgttacaaaaaatagctgaaaaggaagatgaacatgaacaagaataatactaaattaagcacaagagccttaccaagttttattgattattttaatggcatttatggatttgccactggtatcaaagacattatgaacatgatttttaaaacggatacaggtggtgatctaaccctagacgaaattttaaagaatcagcagttactaaatgatatttctggtaaattggatggggtgaatggaagcttaaatgatcttatcgcacagggaaacttaaatacagaattatctaaggaaatattaaaaattgcaaatgaacaaaatcaagttttaaatgatgttaataacaaactcgatgcgataaatacgatgcttcgggtatatctacctaaaattacctctatgttgagtgatgtaatgaaacaaaattatgcgctaagtctgcaaatagaatacttaagtaaacaattgcaagagatttctgataagttggatattattaatgtaaatgtacttattaactctacacttactgaaattacacctgcgtatcaaaggattaaatatgtgaacgaaaaatttgaggaattaacttttgctacagaaactagttcaaaagtaaaaaaggatggctctcctgcagatattcttgatgagttaactgagttaactgaactagcgaaaagtgtaacaaaaaatgatgtggatggttttgaattttaccttaatacattccacgatgtaatggtaggaaataatttattcgggcgttcagctttaaaaactgcatcggaattaattactaaagaaaatgtgaaaacaagtggcagtgaggtcggaaatgtttataacttcttaattgtattaacagctctgcaagcaaaagcttttcttactttaacaacatgccgaaaattattaggcttagcagatattgattatacttctattatgaatgaacatttaaataaggaaaaagaggaatttagagtaaacatcctccctacactttctaatactttttctaatcctaattatgcaaaagttaaaggaagtgatgaagatgcaaagatgattgtggaagctaaaccaggacatgcattgattgggtttgaaattagtaatgattcaattacagtattaaaagtatatgaggctaagctaaaacaaaattatcaagtcgataaggattccttatcggaagttatttatggtgatatggataaattattgtgcccagatcaatctgaacaaatctattatacaaataacatagtatttccaaatgaatatgtaattactaaaattgatttcactaaaaaaatgaaaactttaagatatgaggtaacagcgaatttttatgattcttctacaggagaaattgacttaaataagaaaaaagtagaatcaagtgaagcggagtatagaacgttaagtgctaatgatgatggggtgtatatgccgttaggtgtcatcagtgaaacatttttgactccgattaatgggtttggcctccaagctgatgaaaattcaagattaattactttaacatgtaaatcatatttaagagaactactgctagcaacagacttaagcaataaagaaactaaattgatcgtcccgccaagtggttttattagcaatattgtagagaacgggtccatagaagaggacaatttagagccgtggaaagcaaataataagaatgcgtatgtagatcatacaggcggagtgaatggaactaaagctttatatgttcataaggacggaggaatttcacaatttattggagataagttaaaaccgaaaactgagtatgtaatccaatatactgttaaaggaaaaccttctattcatttaaaagatgaaaatactggatatattcattatgaagatacaaataataatttagaagattatcaaactattaataaacgttttactacaggaactgatttaaagggagtgtatttaattttaaaaagtcaaaatggagatgaagcttggggagataactttattattttggaaattagtccttctgaaaagttattaagtccagaattaattaatacaaataattggacgagtacgggatcaactaatattagcggtaatacactcactctttatcagggaggacgagggattctaaaacaaaaccttcaattagatagtttttcaacttatagagtgtatttttctgtgtccggagatgctaatgtaaggattagaaattctagggaagtgttatttgaaaaaagatatatgagcggtgctaaagatgtttctgaaatgttcactacaaaatttgagaaagataacttttatatagagctttctcaagggaataatttatatggtggtcctattgtacatttttacgatgtctctattaagtaagatcgggatctaatattaacagtttttaaaagctaattcttgtataatgtccttgattatggaaaaacacaattttgtttgctaagatgtatatatagctcaattattaaaaggctcttagaaaaaacgtatttaaatttaaagttaatgaattgtaaggaaaggcacttcattctcacctcgttatgtcatagaagaattagaatgtttcccagaaatagataaattatagttagcgatttgacaaacgaaagagaaattcattgtagacagtttagaattacgcattatagatgaatagttttatgcatagttgctttaaatgacacagtataaaagataaacatcactcttataagagtgatgtttatttttttatactgtgttctaacataagtgtatagaaaaacataataaaagtagggggggaagtgtagaggtaaatgaatattcttcagtagaagtataatatgatttttagtccttactaatatcagacgaaattaactatctcataaggcttatattgatggaggattaaagtgtttttataacaattggtgaataggtagctccttcatttatcattttagccaagaagattccttcctcaaggagcgtgaagggtcacagcacaatgagtaggttggagatgaattggcttgttcaacatacataaatcgcgactgcctctctttagaatacacgttcggtgtatggtagccatatacagaaatggaggtgaatcaaatgatgattaataaagcttataagttttatatctttccaaatcaagcacaagcaattctaatcaataaaacgattggttgttctcgctttgtattcaatcattttctttccttatgggatgacttatataaagaggcaggaagaggtttgacctatggtacatgttctgccaaagttcctgccatgaagaaagagtttgtttggctaaaagaagtggatattattgtgattcatttgtctgtttataatcttgcagatgcgtatacacgctttttcaaaaaataaaacagcgcctcgcgctttaaatctaagaagaacaacgtacaatcatataccacaaaattaaacaaacgaaaacattgccagtgtaggtaaaaaataaagttgccgaaagtcgcgaagtaaagggacgtattgtaaatgctacagttagacggaacccttctggcatatactttgtttcattgttagttgaaacagaagtacaagaacttccgaaaacacattcttacatcagaatggatatgggactaaaagattttgccattttgtcagatggaacaacctataaaaatccgtaattttttcgctcattagaagcgaaggtggcgaaagtacagcatgttctttctagaaggacgaaaggatcttctcgctggaataagcagcgagtaaaggtagctaggatttattaataaatggaaaaatatagaaaatattacttagacaaaatctcgactgaaatcatcaaaaaccatgatgttatcggtatagaggatttgcaagtatcgaatatgttacagaatcacaagttagcaaaagcaattagtgaagtatcatggtcacaatttcaagccatgttggaatacaaagcaaaatggtacggaaaacaagttattgtcttatcgaaaacaattgcttccagccaataatgttcttgttgtggatatcaaaacaaagacgttaaaaatctaaacctacgtaagtgagactgtccttcttgtcgtacacatcatgatagggatattaacgcaagtatcaatctaaagaatgaagcaatatgacttctaaccgaaaggactgcggagatagcctaatcaattagagttcgatagaattctttacttaggaatccctcacttctaaatgaagtgaaagtgggggtagttcaaaaaaagcatagatatcttcttctataggtgaagatatctatgctttttctttttaaattaaagatatactttactcatacggcagggaaaattattaacaggagataatatccaattctaataattgtataaatagtttgaacatgtttgaaaattaaccaaacaatttttgttttgaaaaatggattctctaatacacctgttaatgtaacgtatggaaaggagaatagaagcagttaagaaagcggtaaatggatgattaactagatttaagaaagatgaagggtaatttttgagaaataaaataatcaactggaatgattaggaatttcggtattgtgacagttttcaaattttatactagtaataaataaattactttttgaaagtaatatcattacaaaaggtacttggaatcttcttgcttattccatgattccaagaaaaatcgccatttacacactagtggaccaaaatacagaaacaagcgaacatgctagatttgcaaataatggtggtgtctcatctggtatatgctgggtattactgtagatgatttagggaggagcatgatggatggctaaatgtaggctttcatgtttaaagtatgatccttcctataccatatacaaattatgcgtataacaaaagtgagaatgattcctatgtttaagacttaattaataattataatcaaagttagagttgtaattgtggttgtaaataagcactttcttaaaaatattcgttattatcaggctaatttagtatctttaattttaatatattacttaatatttaaggaggaattttatatgaatagtgtattgaatagcggaagaactactatttgtgatgcgtataatgtagcggctcatgatccatttagttttcaacacaaatcattagataccgtacaaaaggaatggacggagtggaaaaaaaataatcatagtttatacctagatcctattgttggaactgtggctagttttctgttaaagaaagtggggagtcttgttggaaaaaggatactaagtgagttacggaatttaatatttcctagtggtagtacaaatctaatgcaagatattttaagagagacagaaaaattcctgaatcaaagacttaatacagacactcttgcccgtgtaaatgcggaattgacagggctgcaagcaaatgtagaagagtttaatcgacaagtagataattttttgaaccctaaccgaaacgctgttcctttatcaataacttcttcagttaatacaatgcaacaattatttctaaatagattaccccagttccagatgcaaggataccaactgttattattacctttatttgcacaggcagccaatttacatctttcttttattagagatgttattctaaatgcagatgaatggggaatttcagcagcaacattacgtacgtatcgagattacttgaaaaattatacaagagattactctaactattgtataaatacgtatcaaagtgcgtttaaaggtttaaacactcgtttacacgatatgttagaatttagaacatatatgtttttaaatgtatttgagtatgtatctatctggtcgttgtttaaatatcaaagtcttctagtatcttccggtgctaatttatatgcaagtggtagtggaccacagcagacccaatcatttacttcacaagactggccatttttatattctcttttccaagttaattcaaattatgtgttaaatggatttagtggtgctaggctttctaataccttccctaatatagttggtttacctggttctactacaactcacgcattgcttgctgcaagggttaattacagtggaggaatttcgtctggtgatataggtgcatctccgtttaatcaaaattttaattgtagcacatttctccccccattgttaacgccatttgttaggagttggctagattcaggttcagatcgggagggcgttgccaccgttacaaattggcaaacagaatcctttgagacaactttagggttaaggagtggtgcttttacagctcgcggtaattcaaactatttcccagattattttattcgtaatatttctggagttcctttagttgttagaaatgaagatttaagaagaccgttacactataatgaaataagaaatatagcaagtccttcaggaacacctggtggagcacgagcttatatggtatctgtgcataacagaaaaaataatatccatgctgttcatgaaaatggttctatgattcatttagcgccaaatgactatacaggatttactatttcgccgatacatgcaactcaagtgaataatcaaacacgaacatttatttctgaaaaatttggaaatcaaggtgattctttaaggtttgaacaaaacaacacgacagctcgttatacgcttagagggaatggaaatagttacaatctttatttaagagtatcttcaataggaaattcaactattcgagttactataaacggtagagtttatactgtttcaaatgttaataccactacaaataacgatggagttaatgataatggagctcgtttttcagatattaatatcggtaatgtagtagcaagtagtaattctgatgtaccattagatataaatgtaacattaaactccggtactcaatttgatcttatgaatattatgcttgtaccaactaatatttcaccactttattaaagtttgaggttcttatgtaaatataagtttatagtttttgatctatctactaaaattaagtatatataatgtatggatgttagaggttgtcttaaagtagttgaatgattactctgaggcaacctctttatttttattcttaggaattcacaaatagtaaaatgatatttcagctatacaaaaaaataaccatagataacataaaagttttcaaaaatacaattaaaaggaatgagataataaaaatacttaaatttaaagaaataacattgcatactattattaattttttgtgacattattaaacctcggtactgtttccaaatgaaaatatgagtatttatgtcaaaattgcaatatatttataatcataatatatgtttgtgaattaataaactaattattttatgtgttttatgtttaatttagtgaaaattagcttttaaatacttatatatatatgattatcattaaggaaaaacaaaatgatttcttagtaggacactattatgagctaaattaataaaagttatttagtaaaataattatgtgtaagatagggggaagaatataaggtgaattttaacaaaaatattattaaatatggatatggattttagcgataactgtagaaatagaaaattttacagtgaaataactacttacatttatgaaacaaagggaggactgagttcttaatatagggaaataatctcagtatttagttcaattctatgttaataatctaggggaaatagcttacttcgtattgaaattaatgtgaacgtgtaagattttaaatccaaaaatttatatggtccattgccagtgggccccaaaataattattaatatcacactttgtgttagacaaggtgatttagaggatgtaaccaattttgaaaaactgttaattttatgggaattcgtaaaatatattctaatacaataacatatgttacaaaaatgaaattgcgatagcgagcgaagtacatggtaaaattggtacaccattcctagagaatgggagcgtaactttaaatgcaaaatgtaattctacaaacactttgacgtacaaaaaccatggaattttagattatgtggaaacggtttaatctattattatgctcccgcatactattgcctatataacggtattattagatgtgaaaatcaaagagggagtcttcactcataacttggagaatgattacccttagttcaatataaggtaatgaataaaagcaggcaaagttagacatattggagatattcataaattcaaagctcttctataattactgatgatccagactactattcagctaaccgaggatggaattttttaatgagaatactgtaacattttaaatgtgttatttgaatatacggacataaaattagaagggtttttttgaaaaagtttaactataaaacccaatatattatcacttgagcagaaatctacaaaaaaatggattaatttaataatgtgcatacctcaagtttaatttataaaatacacttgaggtatgtatccatatagttctttaaactattaatatgcttatttattatatagaatgtcttccgaatgaaacagcaaacacgaaaataatattatagcatcaatattaaaagtaacttttttggatatatatgagcagttgatttcaacaaagactttttccgttactatatagaaacccatatttatgttgatagcataaagactattgaagggagcttgctttagatcaattttataacggatcgagtaagaaaccttgatagacacatcaagaaaaataaaatttttcttatgaattaaaataaaaacagttcgaaatatatacccgaattacaattatatttattgaatctaattcttaataacttattataacaatggagtgaatttgattgtcatttataaaaaatagtaagataggcactaaattaaacggattgataacgatatctatcgtcgcttgtataaccctttccacaataggttttttttgtttagcagaaagtaagaatgcttcaactaacatgtacgaaaataatttattgtcaatccaacatattggatctgtagaagcgaatattttccatgttaatatgaatttaatggagatgatgatatcaaaagatgaaaaaagaagtaaagaattactggcggagatcaacgatgctcgaaaagaaaatgataagttattaaaacaatttgagtctaaaattagttctaacaaagaattaaaattgtataaagatttttacggattatttgatgaattaagaatacaaataaaaaaaatacaagatataaacttatccaataatgaagacttatttacatattatttaaaagagattgaaccaaatattaaaaaggcaatagaatctatccaggaacttattagatataacaaaaataatgcacaacagttacagaaatctaatatcagcagtataaaaaatacaatgacattgtttattagcatatcagttttagcaataataattgttactttaatcggttattttattaaacgtgcaatcaagcaaccaatcatattattacaacaagacatggaaaaagtatctgcaggtaatttaacaatacgcacttcttatgaatctaataatgaattaggacatatagtacactcttttaacaatatgttagataatctacaacaactaataggaaatgtaaagagtacagccaacgaggttatttcttctacagaaggtatgttaaaaaacacaaaaaaagcatcttatctatcaaatgaagttgttcaaaatatttctgaagtaaataccaaaatagaaggacaatttataagtatccaagagaattcatcatcattaaaagaaattgctaccggagttcaaactatcgctgaatcatcaaaaatggttactgaaatgtccgttgaaacaactgaacatgtaaattcaggcagtgaagaaataaaacaatccatccttcaaatgaatagtgtacatgcagtagttgaagaaacctctatagtaatagatacacttgttacacgcacgcagcaaattgataaagccctagatgcaattactaatattgcagaccaaactaatcttttagcattaaacgctgcaattgaagctgcacgtgctggtgaaaatgggaaaggatttgcagtggttgcagaagaagtaagggatttggcagaaaaatctaaagagttcgctaatgaaataaatcatttaatcaaaaatattctacaagatacaaaagctacagttgatgtaatgcaaagggggaaacaaaaagcaatagaaggaaaagaagccgctcagaaggcaaaccaagtattcttttctgttgtaaaggatattgataagatttctagtcaaatgcaagaggtatgtgcagcaacagaagaaatgtctgctggaacagatgaagtgaatatatcattgtcaacagtttctaaaacagcagcacaagtagctaatgggacaagtcatgctgcacagtcaatccaagaacaggcaatctcaattgaggatattgccaatcaatctaacaaagtaaagggaaaagtagaagaattggtacagttagtttcacaattcactatagagggacatggaaagaaggattaaattatataacgtaactttcacttgacttagtaaaacatgtattggtgcaaaaaatggttctattgtgaatttttaagagataaaatttaggtatgattgctagtgatttttgcaatttatcatacgtagaaaaaacgaagtttggtctttataaacttcgtttttttttatatagaatgaacggtttaaatgccctttaaggaaagtgaagcatgacgaatactttaaaatcctaagaattttgcaacacgtctttttatatttctatgccaatggtcttgctcgatgttcgcgttcctttcgaaattggaagcctagtgtatgaccattattaccaattggacaatctaaaagctacattctctgttttcctttatataggaccttttaatttctaaaatgataattgtataaaaagaattaatgttatttaagatgttgaaatattgttaaatctacaattttagcgttacttaaaaataaattatattaagcaacattatttggtgtctttaaagttttttgattattgaatgatattaagtataaaaacagaaagaagggatgaatttggataataactccttgttaatagtatgctttaaaaatcatgaaaactaaaattgtagtatttttctccataacatccataatttttttcatagtattcacttatgtatataatcagaaattacctaatcataagtatccacaatggggtgaatttctaaaatatatttcttaaacaagatagaggagtaagtttaagacggatattaaattaattgaaattggacatatttagagtatagaaaaactgctgaggaggaaattatatgaatattcgagaaagtgaattgccgggcatcggttataaatttcatattgtcacaaaagataataataaaatggtaatcgtgattcatgatgatggacgtagagaaatgtatcattttgatacagaccacgaagaaagtatctcaagtgtctctttgtgtgattcagaggcaagaaagctcgcagcaatattaggaggaatggtatataaacctcaagctttagaaacaattgaaatggcatttgaaggaataacaattgaatggtttaaagttgaaaataaagctcttgccattgaaaaaacaataggtcagcttgaaataagaaaaatatacaatgtaactgttatagccattataagagaaaacatgaaaaaattatttaacccaggaccagaatctgttatcgagaagggggatatgttagtagtctctggagaaagaaacgaagttaaaaaacttattaatgaattactttcaaatagaggagactgactagatggatactttaatttttgaagttggtacagctctaattttagtagcaattgcagcagtagtcgctggaaggcttaaattttcaattattccttttttaattgttctggggatgttagttggcccacacgctccggtaataggtgtaatcgattttagatttatagaaagtgaaagtgtaatctctttcttgggaaggataggagtactttttcttctattttacctaggattagaattttcaatgaaaaagctaattaaatctggtcgttctatcgcgattggtggaacaatctatattttgattaatttttcgttggggttactatatggatttttgatgagattccctttattagaaactttgattatagcgggggttattacaatttcttctagtgctattgttgcaaaagtactagttgatttaaaaagaacagggaataaagaaacggagctaattttaggaattatcatgtttgaagatatattccttgctgtatatttatcagtggtttctggcttagtccttggtgatcatgcttcattcttaggtgctcttacctcaattggtatagctttgggatatatgctcttattctttattgtagctagatgggctactccgttattaaataaattgttgaatattagttcagatgaaatttttattatagtagtattttcttctttattctttatcgctggtttttctgaaacaattcatgttgcggaagcaatcggagcgcttctgttaggtttagttttttctgaaacagagcatagtgatcgaattgaacatcttgttgtttcatttagagacttttttggagctatcttcttctttagcttcggtttaggtatagatccgttttcgttgggtggagctatatggctaacgttaggtgctgtactactgacaatcatcgggaactttgtagcagggatgattgcaggaaggcaagctggattatctcataaagcatcgacaaatattgggttaacaatcgtgtcaaggggggagttttcaattattatggctaatattggtatggcgggtggtttaatgtcagtattgaaaccgttctcagcactatatgtacttatcctatctattttagggccactctttactaaagaatcgagaaaaatatataaatttttaaataaaatatttaagtgggataaaaaatctgcttaaatttagggaaataaaatctttttaattacttgcatttttattgtagagtttctgtagtttgcatgaattgagggattgaattccttgtgttaattaacatatatatcgatttgaaataaaaaaggagctaaaaggatttaatcaactgttagctccttttagctcctttttaggtatatcgaaaaaaaatcaaatcatacatcacgaaaagaagtttttaagaaccattcctaaaatttcaaggcattttagatgttttatgtggaaaagcatggttaacttcatcaataggtgaaaatatctatgcttttttatttcaggacagagatatactgtactcataaatatagaaatatgtatttaagaaagattgaaagcgtattaaataatctgataggagatgtagctatatgacagtattcaatgttaaagaaattaataaaataccttttgaaagtaatatcattccaaaaggaaaccgtaaccgtcctgcatataccatgaatccaagatatatcacaattcacaccactgcaaaccaaaatgcaggtgcagatgcaagagcgcatgctagatatgttaacaatggtggtggatcatctggtgtatcctggcattttacggtagacgatcatcggattgtacagcacttaccactaaatgagaatggttggcatgccggagacggctctgacgatgtattcaccacaccacagaaagacgctgtaacactttatagctcggtttcaatttctattcaagcaatacaagaagttcactttgaagttaaaaatcttcaatttgaccacggtatgttgaagcaggaagttgacactcttaaagaacaacttgaagtagaaaaacttgagaaagtttcaatgaaagctgaaattgctgaattaaaggtattagtacaacaattaataaatgaggaaccaaagcagccataagctgtttttattttgcacaaaatagggcttttgtataaaaaaattttcatgcattcactcagaaaagagttgtctcatagtatatagagattgtcttattaagatttcaaaagggatgtgaatgtatggaagacgtatatgtaaaaatcgaaagcctaaaagcagagcaaaaataaatcatgcgagatattcgtaatttagaaactcgtacaacgataaacgaaaaagatatttctaccatcaatcagcaattagaaaaaatcagtctaaataccacttggattttacgaattgttgtcagtgcaatagttatggcaattttgggtttgatacttaaaggtgggatttaggttgtttatataaaagtatttgtgaaagagggacaagtgtctctcttttttatcttgaagaaggagggaagaatgtggatcgtatcgatgtattattaaaagtttttattgccactttcggtgggttttgtggttatttcttgggaggatgggatgcaacattgaaaatcttagtgacaatggcagttattgattatgtaactggcatgattgcagcaggatataacggagaattaaaaagtaaagttggtttcaagggcatcgccaaaaaggtggtgctttttcttttggttggggcagcagcgcaattagatgcagcgttaggaagtaatagtgcaatccgtgaagcaacaatttttttctttatgggtaatgagttactttcacttttagaaaatgccggaagaatgggcattccacttccgcaagctttaaaaaatgcagttgaaattttaggtggcaaagaaaaacaagaagagaaaaaaggggatgttcaataatggaaattagaaaaaagttagttgacccaagtaaatatggtacaaagtgcccttatacaatgaatccagaatttatcacagttcacaatacgtataatgatgcgccagctgagaatgaaattgcttatatgatacgaaataataatgaagtgtcattccacattgcggtagacgataaagaagctgtacaaggattacctttagaacggaatgcatgggcttgtggagatgggaatggttcaggcaacagaaagtcgattagtgtggaaatctgttattctttaagcggcggggatagatattataaagcagaaaataatgcagctattgttgtagcgcaaatcatgaaacaatacaacattccgataaataaagttcgcacacaccaatcgtggagtggaaagtattgcccgcatcgtatgttagcagaagggcgttggaattcttttattgaaagggtgcagaacgcatataacggtggtgggaatgcaggttctacaaaaccatctaacaatggtgtaggtgttgttataattacagcgaatgtcttacgcgttcgtacaggtccaggaacgaattatggtattgtgaagaatgtgtaccgaggggaacgctatcaatcttggggcattcaatatggctggtacaacgttggtggaaatcaatgggtttctggggagtatgtgaggtttgagggttaggataacaccatttttgagattgttcatactctgagactacgaataaggcctatgtgtatgtgaaatgaacggaaaagagcattcctctgtgaagtgacccctaaaagttagacacggttatttcattaggcagcttgataaaagtgagtccggtattgtaccgggctcatttttaattttgccttaatccgtttcgtattataataatctatatatttttctaattctattttaaagtgctctacattttcaaattcttttatgtagaggaactccgacttcataatcccaaagaaattttctattactgcgttgtcgtaacagttgccttttcgagacatactctggacgatagctcttgattcaagtgtccggacgtactgtctcatttgataatgccatccttgatccgaatgcatcagtagctggtgggtttcaggtaaacgttccaatgctttctctaacatgtctgaaacaagcgaaaattgtataggtaataatttcaccattatacaaatctaatacaggtgatacatacagtttttctccaaacaatttaaactctgtgatgtctgttacccacttttgattcggtgcatctgtatgaaaattacgctctaaaatattaggtgcaattctaccgacttttcctttataggatttatatttcttcatacgcacaacacactttaacccaagctctttcataatgcgctgaaccttcttgtggttcactttctggccacgattcgttaattcatcacgaatgcgacgataaccataacgaccttcattttcctcataaatcgctttaatctcagctttcaaatcggcatctacatctggacgattcattttctttactaaatcataatacgtgcttcgaggaataatagctagctccacgagtgccttcaccgaatatttatgccttaattcatagactacttgcgctttgtcttgttttgtgatttttccttgttttgaactaaggcatttaacttttttaagtactcattttccatctcaagctgtttaatgcgtgcttcaagtgcttcgactgatccttcagctaaaggttgttttacttgtttatttgaatcttttttcatggatggacgcccctttttcttagattgaagggcatcaattccttgtgtttcgagctgttttttccaaacagaaatcgttgaaggggcaggaatattaaagatagctgccgtctcaaataaggacataccgttttcaatcataaagtttagtacgtctagtttaaattgttgtgtgtaatttgtacatcgttttagaaaagcttccagaccattctgtttatattggtttacccaattcaaaatgattgtgtcacttataccgagcgatctacccatttctcgataactttcatttccgttcaaataacgtagaacgatttgtattttttcatcagctgtaaatttagccatagaaaaactgcacccccaattgttagactgtgtctaacaattggggtgcagttcactggcgagtgagggacgctcttttttaacattataaagatatatctctcatttggtttgtcgatagtaatcatatgtaacgaaaggaataaatatgaacaataaaaatcagagtactcttgtggagtgctctgattacataggatgctatataaaaagggaacgtgttaattacattgtatgtagcaacatgctgaaatatgagaaaaagcaatccagggtggtgaggccggaatgctttttctgtatatagaaaggcatcatgctaggagcaatttaatatatgcttctaaagtacgtaatgttccatcaaaataaaaaggcaccttccccagctgaaggtgcctcatgtggtgattctctaaatgtataaatagtatatccaatattagtgaaggatagaacttattattgaccgataaatgtatatgttaaatatatttttacaaaagaatagttttataaatcagaaattcttctaacttgtttttctttcttcataaaattcctcttatattgtttaaagtcttgtttatcgactctgaacttctctccagtagcaacgtttttaactaaatatgttgtacgcttaaattctctaatgtaatagatcactaatccaactaaaagggatatacacattgttgctgggatagctaaaatacaaagaacgataatgaacgcagaaattttatctgattcataaactctttttaacactatgcgttttccagaagcagcttgcgcttgttgtaattgttgcatgcgttgtagcgatgcgacggtatcataactcacgtgttcaacctcctattttaagttgtattgaattaatacatattcataatattttattttgatgtaactacactgttattgtacattttgtctacctgttctttattatatccatatgacagtgtcaatctgtcatctacaaacaaacaagtgcctacattaaagcctcgacacccagccataaatttagaaagtttaggaataaaaccaattgcttcaatatccattaaaataaaacgtactggaatcgctcttttattttgctgtgcaccttttaacatatggctcataaatgaaaaaattcgatttcctatatcgggcataaagtcttcttgttgttgatcatgatctgtatacgtgaaataaacaataattttacgctttaatagttgcagtaaatcttgtttagaatttgaatgtagttctgtataaggaagtaataagatttcataaccctgatcatattttagagcagatgttttttgatacataatgcctttgtaatctaatacaaaaagtgattccgcttcaaaacctatgataaattgctctacttcaattaatccatttttaggatcataatatttttcaataattcgatttaatgttttgaatgatggttgttttgacattgtaattactcctggttatattttttctcttggtgtttttcagtggctaatttttcagatgttttcctgctcaccttaacttttaatccgtattttctttcgtaaagttcttcaaaaacttcctctatttttcgttcaccgtatacttcttttacaatcctcaagttggttttgggtctaggcatatattatattatctcccctcttcaatccaaatttcttccacagtcagatccaaagcttttgcaatacgaagcgcaactcttaacgtaggttcacttttccctcttgctatcatgcttaatgtttggtctgtaatacccaccagtttcgcaagatcagactgttttagcattcgttcggccaagattatctttaatttacacttcataaaatccctcctttttcaatgttctatttcaatttttaaaaacctctaatatttttatttgtggacaaacaagttttaaagttctacatcatatacctatattacttccactcagaagcccacgaagacttctacttggaattccaaatggcatcgtagatattaagagaggagagggttgcatgcgttctcagtatagttatctcaatgtaacgccgtatttatattcatcaaaagaattacgtcacatgtataacgaatcaagatccagaaaagagacggaatctattcttactcacatgaggaaccatgaagtatttgataataaagaatacaaagggtatttcaacttatcacaagttattgaagaagatttatatggagaagaggaagatatattgaattggcaagatttaatggagcggtatcaaattgtagctaccaaatcagggattaaatttcgtgagaaagaggaactggttgaggaggaatggctatgacacttgcaggagaagcagtcattatttggacggcaacaggtttgtctgtaattgcgatgagtgtagctgaaaaaatggggaagagtgttccacattggcttccacgtataaccttgtatacgacgcttacgggctcgttcttatatcttctacgttatgttctcgttatgtttctatgaaggaatatgatgtggaagagagggacagtagaattcataagcgaaaatgcttgttctgtcttcttccaacaaagtgcaatgatatccttataggatatctaaaggagaaatgtttatgctggaattactattggtcccgacgacagctttaactattgcattcgtaagtgatcggtttaaaagtaaaatagatgataaaaagaagatacaagtattttttgaagtgtcaggaattgcaattaaaaaagatgataggattcattatccaacatttaagaagcgaactcatgatgatcgaagtacaacatatgtgtatgagttgcctgttggtatgccgagtaaaattattcaaaaagttgaagatgttgtaagtgaagggttaaataaacctgttcgaattcagtatgacaattataaattgaacatacgtgtattcgatcaagaaataccaaagaaatgggaatggtcaacaaatttaattcaagctggaaaatggcttgtgccaatcgggcaaagtttagaacaattggtttatcatgattttgataaaacaccacatatgacattaggtggtttaactcgtatgggaaagactgtattcctaaagaatgtgatgacatctcttattactgcacaagcaaacaatacgcacttgtttattattgatttaaaaggaggattagagttcggaccgtaccaaaacataaagcaggttgattctattgcagaaaagccactggaagcttttcaggtattaagcgcgattctaaaaaagatggaagaaaaaatgctttttatgaaagaacaccattataccaatgtggtagaaacaaatataagagaacgctactttattatcgtagatgaaggggcagaactttgtcctgataaaagtatgaatagggaacaacaaaagttattaggagcttgtcaacagatgatttctcacatagcgcgaattggtggagcattaggatttcgattgattttttgcacacaatatcctactggcgatactttaccacgtcaagtgaaacaaaacagtgatgcaaaattaggatttcggttaccaactcaaacagcttctcaagttgtcatcgatgaaactggtcttgaatcgattgaaagtataccagggcgtgcgctttttaaaactgatcgattaacagagattcaagtcccttatatctcaaatgaacagatgtgggacgtattaaaacaatacgaggtgaaaaaggatgcatatgcagacacatatcaaaatgaatcgtcagatgatgattttgacctcgattagaaagctaaaatttgcgacaagaagacacttaatggcaattcacgatatgggaggaattcgaaatgcaaatcgaattttaaaagatttaagtccatatgtgaatagtaccgtttataaaaaagagcatgtatattacctcaataaacaaggacgtgcgctattcgatgatgtagaaaaggttgtgcccaccattcgattagcacacagcctcatgagaaacgaagcgtggctgaatctattttgtcctgaggattggcagatagaagcccctatacgttataaagtagatgacaagaagcgaaccattattccggatgtaaagtaccgtgatagtgacgggattctcaatgcagtcgaaatagatcgtacacaaatgatgaatgtgaacagtgaaaaaatgaataagtatggtgaattcacggtgtattataaaaacaaatataacgggaaagtccctatccttcatttctttacactcacaccatttaggcaaaagacgctagaacaatttgctgtgcagcaaggtgtatatgcaaaggtatatgtgatacctgaagtgtaaaagagagcatcacataccaaattcagggtcaaaataatatttgttcatcaaattgtttacgataccgttgaaatacgcaaacttaccctttttcattttgactccatcttttaccttcatcgcaaattctttcatagcttgtacaccaatttgtagttcttgttctttgtcaaacgccgtttggcctgttgtatgatttattacacaattgcattgttttacgaccttccaaaattcttgaattgttttagcttttgaataaaatgctgaagttagggaaacgaaacgtttcggaacccaatgggctacaaattcagcacatttaatgttttctttaggtacagcattattgtcattaccattacgtttatttatatctttactcttttgttttaagattttagtatttgttttaacggtaggacacttcttagtcgtttcagtagggtgcttgtgggacacttcatttacaattggttggataataattgcattagaagtttggcgcatatctttttttcgcttcatggctatttgcttaattattcttaaagtcacaagtttcgtcattaaacgttgtacagttttatatgatacgctcattatctcagctattctatttttacataggaaactaacacctacgtatttgcagctatgacgctttaaaatttcaagtaatgcaattaatttagattgtacatctgcacgtttaatagacgttttaattacatctctgtatactctaatcgtttgatttaattcctgtacatttgaaaatgttgataaattatgataggactctggttgagctaatacatcaatacactttttcataacggtttgtctcctttttggaaacaaaaaagcaacgtcaccgatttattggtaaacgttgcttaataccccttgtatgaggtaaaataactcatgagagtatagcaagtgtttacctggtcagctcaggtggacggtatatacggtggtccaacaccatatatacacgctgtgctcttttgtttttatggtcacattttggtaacgaatgaataaaatttaaaatttattcatgatttttaacgttacacaaaccgttgatatataagggtttattactatttttaaaacgaacgtaaataacctttattgacgaacagggtcaattcctttttttgttttcaaattcttcttctgaaatgactttaaatccgtgtcttttaaataaagcagttgtcactccgaaaccagtttgcttattaccgttaaattctccagtgtaaatcgtagaactaccacaagatgggctgcgttcttttaaaataatatattctgggtgtaaatctttaatttgttctaatgctttataagcaccatttacgaaagctgctgtgacatcttcaccattttttgttatcactttcgcttttccgtctaaaacgtcgtcgccattcccgccaataatttcagcggaaggacgaggtgttggtagtcctcctaatacttcagggcaaatgaggactgtatcttctttttgcagaagctcctctatttttgaaacgagattgtcattcccgtcataacggcaagcaatcccacctaaacaagcgctaattacgatcatattttcatctccattaaaaaatattaactatcacgccaatttcgcttcctgcctcttacttataaatgaggtgatataaatgggaagcttatataatttaatgaaaccatatagtgaatttcgaagtaaagaagagtttaatacatatcaaaaacaagttttgaagtgctaccgatttcaattgaataaaactgattctatcattattcattttttaggaaaatatgcggtgaatgagaaacaaaaaacagtaggggttgcttgtccattaatggggacgattgcgacgaatgttggaaagagtattcgtacagtacgccgttcaattgcaaagttagaggaactaggaattataaagcgtgttgcaacaaaagaaaggcataaacgcggcgggtatagtgcgaacttatatgtatttcttacatctgcgattgaccgcatggatgaccgtatgaaaatgtccgcttgtaaaactgaggataatgcaactggctgtagtaaaaatgagcaaaaaattgctggggaaacaattctttctaaaaacatttcacaaataaaagagaaaagaaaaggaacgtatgagcttgatgagacgtattgccgtcatgatataccgaagccttttatatacgcactggtgccgatgacgagtaatccgaagaaaattaatatattttggagtaaggtcgagcttgcgtataaaaagagtgggttactagaacaaggtgttttactagagcaaatattagctgacgaagaagtgtatggaaatttaatttggcgcgtgaaaagtgttgtaagagcatataaatatggggaaatttgtaaagacattggggcacttttatacagtacagtgcgagatttatttttagaggttggattagaatggggagcagcattaaggagaagtaagggaatatcactatttgatccattcaaaaaagagccatgcgtataatacatgactctaagtggctaatcgaacttccttacaactggaacacgaatcgctacaaatagtacgaagacgataacagctattgcaccacttttcataacggttacgattggaattcccattgcaagtgcaagtgatgtgaatgcataagagagcgggataaagcccattgatgatagcataagtaaactcattacgcgtcccatcatttcttcttttactgtcgattgaatcattgccataagcggtacaatcgccattgcgattgtaataccataaaacatgccggctaatagtgcttgccaaagtacggtgctaaagttgatggctaagaagaatacaccagacaatagcatcatgataatacaaaatagaccgcgtctacgattaatattttttaaacctacaatgatagcaccgattgccattccgccgcctacagatgcttctaagtaactaaactggagcgaatcaccatgcagaacgtttttaacaaaaagagggaaaccaacttgcatcgggccgattaaaaataagtttaaaaaagcgctacaaataaggaaagttgaaaggaatggcgattcctttacatataagattccttctttaatggaagtgaacatacctttatctgtatctttttgttctggcatcgtaaattgtattttttgaacgagtatggcagcgacaatcagtaataaaatcgtaatggaaaagattgtctcatagttcgtaaatttaatgagaataccaccaagtacagggcctaagatgaccgatgcttggttcgtcatttgtgtaagtgaatttgcttgtgttaaccggcttttttctaccaattccggtaagatagatccatccgctgaccagaagaaagcatcagcaagtccaaagaataaagcgaataaagcaaatgtatatagtgttacatcaccgacaatgaaccatgtgagaatggttgcgacaagaatcgctcgaatgatattggagtaaaacataatgttttttttcgggaatttatcagctacagcgccgccgacaatcataaaaataagccttggaacactaagggctacgaaaacaacaccgagtgaagcttcaaggtttaatgtttttgctatgtaccacgtttgtgaaaaagtaaaaaaggctaaagcaaagcttgaaaaaagagtagctgcccaaagaaaaaggaaattcgtattttttaataacggttttccgcttccttctaaagcagttttattttgttgtagttcctccatattgcttcctttctatgtgacgaatttaaactaaaaaacctattaacaatcgttttatacagtttctaatatttctatactgcactttctcattgtagacaataataatgaatttgcccagtagctatttaacgacaaaaaaagatgccgaatgggcatctttttttaggctaacgcaatataaatatccaattgaacgttgtttggatctaacgctctttcatcgtaaagctcaaagtctgttgtgaaggcacgtttattttctttcgaccatttccaaatatattcccaagcttcacaaacgacttcagcaactggtccctttcttgttgtaaataccgcatatgtagcggcaggtattgttaaagttgtcatattttcaggaacgtcttctaatgaagaaacaggcataccgattgtaaattgatatgtaccggtttcatctgattcgtagtttgagtagaaagcgaatgtttctttcgtttgttgatttgggatgtgatgcatcatttgttcttgaaagtatcggttccaaagttgtggaatgtttccttcagtagatgcctctttttcattagtcgtcgtaaccgaaacgccgattgcgtggaaagcttctttttttacgataataggttcgtgtagcataaaaaattcctcctttttttaaaaaaagaacgtttgttcttgtttaatataacatatttttacatgtaacggttgttatttttagaaaattttaatcataaaaaacaaactgaaaataactaaaaaatggtaaattttctattgtatgtataaatagggtgaggagtatgttaaaatttttaagtatcctttaactgttatataaacctatacagcacgatgtttttactatattaaaagtatggtaaaggtttgtataagtgtccggtatatatgctatttttgataaattaaaatagtaatattctatgagatttatattgttgacattgggatttcaacgatacattttcgtaggtcggattgttgcgagtggatatatattgctatgtattcggctactaaatgaaagggttactgaaatgaagtaggcggatagcaagtatatagaaaggagaaaggtagaaaatatgaagcaagtattgaagtgttttaatgtcgtaacaatgatcacacttcttctatccatcatattgccttcgcccagtgcttttgctacagagataaataaaaaaagctgggatgagttacaaggaaatgatgtgaaaattaaggcagatcaagtgaatgctgaaatgtataagggagaagtagcggagagggagcacgtatttcaatataagattgaaaatacgggagatacaccaatccgagaattagtaattaaacaaaataatgacaatggaattgagtttctttcgcaatctgtgaaagtaaacggagagaagttacttgaaaataaggtagcggatttctatgtagaggaaaaagataatggaggaaaggttctttcttctaatcttaaaattcaagatttaaaatcacatgaaaaaatgactgtattaataaaagctcgtcgtgcgcaacattttaataaagagtataagcaaaaaattagtgtgcaaaaggatcaactacaaataggaaacatgtctgtagatgttgaagggcttccttctgaagagaagttagaagctaataccgatgatgaggctgacagtagtaagaaagctatcggatcaacaactgattcaaaaactaaagaagtggatggaaaattaaaagtatctgtagaagataaaaatacatctgcacaaaaaacagaaatagagaagataaaacaacctgaggctgagaagcaactagaaaaagagaaaaagcaatcacctttagcagtaaagcagagtgatgcagaagtacaagctgcatcagaaaatgcttcgaaggttcaaatccaaacaggagataaacaaggatttggagacccgttgtattctacaattgctcctggtaatttagtacagactggtaatgtgacgcttggtttgacatctgatcattatggcagacaaagtatgggttataaaacgaataaaatgacggttgatgttgataacgatgatagtacttttaattcgtcaacaggtgcatttcctaacattcctgctggaagtaaagtgaaaaaggcttacttattctggacagcagcaatggggttaccaggaaatatcgctgatagaaaggttaccgaggatcaagtaaggcaaccagtcaaaatgagaatgggaaataaagaatatgcagaggtaactgctgatagcataagaaaagctgattatctaccttatatttctaattactcaggtagtggcgcaggatatgtagcgtatgcagatgtaacaaatataattgcacagcaaggtatttctcaaacgttgacagttgcaaatgtgccacaaattaaagatgtaacaggtggcggctattactggggtaactggaatcttatattagtttatgaaaactataaagaaacagtaaaagacatgaagatttgggaagggctagtctctcaaaaaagtacagcctggacagatattagtgttaataaaataaacacaccaaaagaaggcgctttcaaggcggaatttagttatttttcatcgcaaggtgatccagctgataatgatggatatgcctatgattatggagagtatgattttgggttagggtatcaaaagtttaaaaatattaaaagtaaagataatgatgttaatgactcatctatgacagaagtacaagtagatggcactaacgaatttgttacgaaaaaatacccaggatataatccagattggacaaattctttcagtacagatattcatacgtatcaccttgaaggacccactcaagtaaagaatgatttgaaagaaggaaaaatacgttttagagcatatggtggtggcggtgatatttacgtattaaataacgccacattcgttacagaacataatgctccaaacttacaagttgataaaaaggcattagatagtaccggtaaagaagttaaggaaattaaagctggtgaagagtttacgtatcaaattgaagtgaaaaatgatacgaaaaataatcaagcgccggtatcgaatgtaaaaggttttgataaattagatgaccgtttagagtatgttccagggtctattcaatatgtttctggaagtaataaaggaaataaaacagatgatgcaagcgatgatgaagcggagtttgtaaataatcaaattgatttccgtgttggtgaaggtgctaatgctaaagacggcggtgttttaaagccgggtgaaagtaccgttattacattcaaagtaaaagtgaaagattctgtacaatcagatacaacagtaaaaaatgtcgttgttgtaaagggacaagatagtgccgagataaagtatgaaactgaggacgatgcaaatgttacggttactaccccaaaagaagttccaggggaaatagaggcgagaaaaatagcttctaataaaacaccgaagttaggtgaagaggtagagtatcgtattacatttaaaaataagacaaaagatggacgtctagatgtattgaccattgaagatgaattaccaagtagtcttgaatacgtgaaagatagtttgaaagccgaaggtgcaaaaccagagccagtagagctgaagtttgaaaatggaaaagtaattgcaaagtatccagaaattatggatatggaagaaagaagtatcgtctttaaaacaaaagtaaaagaaactgcaaaaattggtgaagaaattgttaataaagcaaccgttagagataaaacaaatccaccaaagaatctagaagagaagattacaccacagcataaggccggtaaaattgctgcaaagaaaaaagcaacaaataagaagccgaggctaggagaagaagttgaatatcaaattagcttcaaaaatacggtggaaaacggaaaactagatgcagttacaatagaagatgaaattccagctaacttagaatttgttcaaggcagtgtgagagctgaaggtgctgcaccaaatccagtagagttaaaagtagaaaatggtaagataatcgcaaaatatccagagattacggatacaaaagagcgaagcattgcctttaaagtgaaagtaaaagaagaggcaaaagcgggagaaacgattgttaataaagcggttgtgagtgagccaaatggacaaactgagcatccagaggaaaagattacgccggattataaatacggtaaagtggatgtagaaaaaagcgtaacgaatcaaacaccaaaactaggagaagaagtggaataccgaattacattttataatacggtagaaaacggaaaactagaaaaggtgctagtagaagatacactacctaaaggtgttgaatacgtgaaagatagtttgaaagctgaaggtataaaaccagagccagtagaactaaaagtggaagatggcaaagtaatggccaagtatccagaaattacggatacagaaaaaagaagtattgtttttaaagtgaaagtaaaagattcggcaaaagtaggggaggcaatcgtaaataaagcaattgcaaaagatccgaaaaatgagcctgttgaatcaaaggttgttattacaccgcaaagtaaaaaaggtgaaattgctgctacaaaggtagttaataataagaagccaaagttaggcgaagaaatcgagtaccgcattagttttcataatacggttgagaacggaaaactagaaaaggtgcgagtggaagatacaattccaaaaggtcttgaatatgtagaaaatagcatcaaggccgaaggagaagcacctgaaccagtagaattagctgttgaaaatgggatagtcaaagctaagtatatcgatattatggatatgaaagaaagaagtatcgtctttaaagtaaaggtgaaggaagaagtaaaagtagataaagagattgtcaataaagcaattgttgatgatacgaaaaatccaccgattgaaccggaggaaagaattactccgcaacataaggatggaataattgattcgaagaagacagtagataatccatcaccaaaactaggagaagaagtagaataccgaattagctttaagaacacggtagaaaacggaaaactagaaaaggtaataatagaggatacaattcctaacggtttagagtatgtaaaaggcagtgaaaaggctgaaggtgataaaccagctccattaaagttaagtgtaaaagatggaaaagttattgctgaatacgacaatattacggatatgaaagaaagaagtattgtctttaaggtaaaggtgaaggaagaagcggaagtggggaaggaaatcatcaataaggcaattgttgatgatatgaaagatccgaaagaaccagaagcgaaaattacaccattacacaaagatggaaaaattaaagcgaagaaaatcgtaaataatgaaacaccgaagttaggagaagaagtagaataccgaattagtatgaaaaatacggtaaagaacggaaagctaacagacgtgacagtagaggatactttaccagaaggtttagagtatgtagaaaatagtttgaaagcaaaaggtgccggaatagattcagtagagctgaaatttgaaaacggtaaagtaatggcaaaatatccagaaattacggatacagaagaaagaagtatcgtttttaaagtgaaagtaaaagaagaagtaaaagtcggtaaaaaaatcattaataaagcaactattgatgattcgcaaaataagccagttaatccgacagcggaaattactcctcagtataaagatggaaaacttgaagcaaaaaagatagtaaataatgaaacgccgaagttaagagaagaagtggaataccgaattagctttaaaaatacggtagaacatggaaagctaacagaggtgaaaatagaagatgatttaccaaatggattagagtatgtgaaagatagtttaaaagtagaaggttctaagccagatccagtggaattaaaatttgaaaacggtaaggtaatggcaaagtatcctgagattacagatacaaaagagagaagtattacctttaaagtgaaagtaaaaggtaaagtgagcgattcaattgttaatgaagcgattgtgagcgatacgaaacatccgccagaaacaccgacagcagaaattattccgcaacataaagacggaaaagtgaaagcgaagaagacggtaaataatgaaacgccgaagttaggagaagaagtagaataccgaattagttttaaaaacacggtagaagacggaaaactagcagaggtaaaaatagaagatactttaccagaaggtttagagtatgtagaaaacagtgtgaaagcagaagatactaagccggatccagtagaattgaaaatggaaaatggtaaggtaatggcgaagtatccagagattacggacacagaagaaagaagtatcacttttaaagtgaaagtaaaggaagaagtgaaagtcggtaaaaaaatcgttaacaaagcaattgttgatgatacgaaaaatgaaccagaaacaccgacggcagaaattactccgcagcataaagacggaaaagtggaagcgaagaagacggtaaataatgaaacgccgaagttaggagaagaagtagaataccgaattagttttaaaaacacggtagaagacggaaaactagcagaggtaaaaatagaagatactttaccagaaggtttagagtatgtagaaaacagtgtgaaagcagaagatactaagccggatccagtagaattgaaaatggaaaatggtaaggtaatggcgaagtatccagagattacggacacagaagaaagaagtatcacttttaaagtgaaagtaaaggaagaagtgaaagtcggtaaaaaaatcgttaacaaagcaattgttgatgatacgaaaaatgaaccagaaacaccgacggcagaaattactccgcagcataaagacggaaaagtggaagcgaagaagacggtaaataatgaaacgccgaagttaggagaagaagtagaataccgaattagttttaaaaacacggtagaaaacggaaatcacgggtttataggtaaatccctttcctaaaaaacctaactttatcatacgaggaggtgcggtaatatgaaacgatttataagtacggaaataaccaccacctgcatgacaaaaaagcagagtaaggtgatttatagatgtaacaattaaacttttaggaggagattagaagatgaataacgttataaatgttggggtattaggtttaggtacggtcggaagtggtgttgttcatattttgaaagaacattataaaaaaatcgcacttgatacaggatacgaagtgaaagtgaaaacagtcgttgtacgtgatttggaaaaagaacgcgatgtttgtattgatggaattgcagtaacaagtcatgcagatgaagttctaaatgattcaaatattgatattgtagtagaggtaatgggcggaattgaagaagcaaaacagcatattgttaaggctttacgaaataaaaaacatgtcgtaacagcaaataaagatttaatggctgtatatggtgcagagcttcttcaactggcgaacgataatgattgtgatttatgttacgaagcgagtgtagcgggcggtattccagtgttaagaggactaactgatgggttagcatcagatcaaattgaaaaaataatgggaattgtaaatggtacaacaaattatatgttaacaaaaatgagtcaaaatggatggtcttatgaagaggctttacaggaagcacaaaaattaggctttgcagaatcggatccgacagcagatgtagatggactagatgcggcgagaaaagtagcaattcttgcaaacttaggtttttcgatgaatgtttcattagatgatgtgcaagtaagagggattcgaaaggtcgaaaaagaagatttacaaatggctgaaaagttaggatttactatgaagttaattggtaaagctgaaaaacaaggaccagccattcatttaagtgtagaaccgacgcttttaccgagccagcatccattatcaaatgtgaataatgaatttaatgcggtgtatgtccatggccaagcggtaggagaagtgatgttttatggacccggagctgggaagttaccgactggttctgctgtagtaagtgatattatttcaatcgttaaaaatatgaatcaagttccgaaaaataaaagtgcgttaaaagaaccagttccttatgaattacaaggtgatgaagaagtagtttcgaaatatttcttacgcatttcattacaagatgagcctgggatgttacaaaaaataacagaatgtttcgttaattattctgtaagtttaaaagaggttattcaattacctttaaaccgtgaactggcagaagtcgttgttgtgacacatcgaacttccaagtatcaatttgaacgagttttagaagcgatagaagctgtcgcaagtgaaataaacagttactacattattgaggaggaaaaacaatatgtataaaggactattaaaacaatatgcgtcttatttaccggtgaatgaaaatacacctgatgtcagcttaatggaaggaaacacaccacttattccattattaaatatatcaaaacaattagggattcagctatatggtaagtacgaaggagcgaatccgacaggttcttttaaagatcgtggtatggtcatggcagttgctaaggcgaaagaagaaggttcagaagcaatcatttgtgcatcaacaggtaatacatcagcgtcagctgcagcatatgcggcacgtcttgggatgaaatgcattatcgtaataccagaaggaaagattgcacatggaaaattagcgcaagcggtcgcttatggagctgaaattatttcaatagaagggaatttcgatgatgcgcttaaggctgtaagaaatattgctgcagaagagccgattacgttagtaaactcagtaaatccttatcgaattgaagggcaaaaaacagcagcgtttgaaatttgtgaccaattgcaaaatgcaccagatgttctagctatccctgttgggaatgcagggaatattacagcgtattggaaaggcttctgtgaatatgagaaagaaaaaggttataaaaagccaagaattcatggctttgaagcggaaggagcagctgcaattgtaaaagggcatgtaattgaagagcctgaaacaattgcaacagcgattcgcatcggtaacccagcaagttggtcgtatgcagtagaggctgccgagcagtctcgtggtgaaatagatatggtatcagatgaagaaattttacatgcgtataggttattagcaaaaactgaaggagttttcgctgaaccaggatcaaatgcttcattagccggcgtaattaaacatgttcaatctgggaaaatcaaaaagggagaaacagttgttgcggtattaactggaaatggtttgaaggatcctgatatcgctatttcttcaaatcaactagacatcgcaagtgtgtcaaatgatatagaacaaattaaagatcatattaaaggggtgattatgtcgtgataccatttagcgttcgtgtccctgctagtacggcgaatgttggtcctggatttgattcagttggaatagctttgtcattgtatttaggtgtggtggttaaagaaaaagctgataaatggcaagtaatccattcctttgaagaatcaataccgacagacgataaaaatttaatcgttagcacggcatgtaaagtatgtccttctatatcaccccatataatagaagttactagtaatatcccattaacgagagggctaggaagtagtgcatcagcgattgtagctgggatagagcttgcgaatcaactaggcaatttgaacttaactgctgatcaaaaagttcaaattgctacaaattttgaaggacatcctgataatgttgctgcttctatattaggtggaactgtaattggagcacttgatggaaaggatgtttccgtcgtaagaattgagagcaaggaattgggggtaatttctctcattccgaatgcagaattaaatacagatgaaagtcgatctgtattaccaaagatgtttccgtttcatgaggcagttaaagctagtgcgataagtaacgtattagtagctgcattatgtcaaaagcggtgggaagttgtaggtgaaatgatggagagagaccattttcacgaaccatatcgtttagaactcgtaccattattaccatctattcgtaaatgcgcaaaagaatttggtgcgtacggcacagcacttagtggtgcggggccatctatttttatattaacgccatatgagaagcgtcaagaaatcgctgagcaattagcgagagtatttacagatatgaaagtatgtgagcttgaaatcgaccataaaggtattattgtaaataaggaagagcatattggatcgtaaagaaagctggcatggctagctttctttacgttgcaaacctattttaaattaggttttttcggaaaaatataaaacaaatgttgattttgaataatgtaagtaaagagtgcattcattttggaggtgattaaatgaataaagagtcaccagaagaaaaaagagagcgtatgagacaaagtgaattaaaaagtaatcctacgggttctttacgtgacggactcaatagagcggaaacgggtagtccagttgatatagcaggcggtatgaatcggaaaggtacaggaataatcattttagtactacttttaggatatattgtatacacttattttttcagttgaagaatgcttgttaaaattttgatttgtttagtttcataattgttgagaaaaaatgtagttactgtattacatattttctaagcgaattatagttgttcatatcaacttttaatactccaaacagagctagcaaaatgctagctctattattttttgccacattcctgtaacaaagcatctgtatattcattggtggaggtgcagaggatgaaaaaaatgatagcgatatgtcttcttacaactatgtcgttttcgactttagtcggttgtgacgtaaaaggtagtaatgctgtacaagagtctaaaataaagaaagcgacgtataaagattttacttatgatgtaaatccagaaacattcacattaactgtagaacatgagggggcaaaggaacaggcatcacaacccctaccgaaaatgaaggtatcgaatgtaaaaaaagaaaaggatcgtacatcgtgggaatatccagatcaaaaagtaaaaataaaattagaaaagaaaaaagaccacttaaacattgaagtggaatcgactggtgcagaaagctttacatggccgaaagtagaagctgaaaattatacacttccgttatgggagggtaagcaaattccgagcaatgatgagaattggaagaagtttttaaaggatgatgcatattcatttgctgaatcattttctatgaagtttttcgcattaaatggttcgagatattcaattgtatatattgcaacgaatatgtttaataatgaattgaaatttcattcggatccgaaaataggatttgattttacacatgaatttccgagcataaataaaaataaaacatatggatttcaattatatgtgacaaataatgatgcggtaagcattgctaaactgtataaggatgatattgttcgaaaaggtgaatttaaaacattacaagaaaaggctagaaaaaataaagaaatcgaaaagttatatggagcggcgcatttttatttttggaatcaaaatggtttattagaaaataatataaattggccaaaactaagggagcaaataaatagcccgctgtttagtcatataaaagaacttattcaaaagaatagttccgagcctggggaactgaatgtattggatcaagtaagtaaacaagatttcattgataagtatcaaaaaaatgttattttacgttatataaacgaagtattatcgatgaaggaattttataaagaggatatttttcaaaacgttaatcaggaagctagtgtgctattaaagaaaggtgtaggtcacttaacgaatacagaattgtatagcttaaataagcatttattaaagtcgctacttggtgatgcggttgaagaggtaagtaaatggggtaatgcagatggaacggatatattaaaggaaatgaaagaggcaggaatagaaaaagcgtggattggtctgccgaactgggaacaaggatttatgcaacctaatttcgtgacaaaagctaaggaaatggggtatttagttggtccgtatgattcgtatcattccattcacgaaaaaagtgataaaaattggaacacagcatcctttaatgacccgtcattatacgaagaggctactgtaacgaagaaaaacggagaaaaggtgcaaggctttttaggaagaggtcgcaagttaaatccgactttatcgctgcctagtgtaaaggaacgcatgaatgatatattacaaaatggtcctaaatataattcatggtttattgattgtgatgcgacaggtgaaatttacgatgactattcagcgaaacatataacgacacaagagcaagatttaaaagcacgtttaaaacgaatggactacattgcgcaagaaaagggtatggtcgttggttctgaaggcggaaatgattttgctagtagtacgattgcatttgcacacggaattgaaacacctgttattaaatgggacgatgaagatatgcggaaaaataaaacaagtccgtattatgtcggtggatattggtcaccaaatcaaaatgtgcctgaaaaatatgcaaaacaagtaccattgaaagaagaatataaacaagtatatttaaacccagtatattcggtaccattatataaattagtatacaatgattccgttattacaacgcatcattgggaatggggaagtttaaaggtaaaagatgaagttggaaatcgaatgctgtctgaattattgtataatgttcctccgttgtaccatttagatgaagtagagtggaataagcataaaaaagaaattacagagcatctaaaagtttggaatgaagttcatgaaaaagcagtaaaagaagagatgacgaattttgcgtatttgtcagaagataagctagtacaatctgtttcttatggaaaagatattaaaatcattgtgaacttctcaaatgaagacatggaagtagaaaaaacgaaaataaaagcaaagtcggcttacattgataatcaggggaagaaaagtgtgtatacgccgtttgagaaataataaagttaaatatactgtattcatagagattttataattagctggattctttattcatatcgtttgttaggaaaaagacattctaatttaaaatgaaagagttaataaatttgtaaatccgtatgttgcgaagtgctaaatttttgaaattggtaaatagtgacttgccaaaaataagtacgagagtataatgtgaaatggaatacgtattgggtttaagtagtaaccttacaaaattgtaaggttagtgaaaggaaattcaatatgaagataaatagacttacattatacttggtaaagagaaagagaggcgaatgggtatgagctctgaattagaacaaaatacgagaagtaataaaaagcgttctaaaagaaagtcaatgaaatggttcatattaattccatttttcctacttatttttggaggagtaggatatggttcgtttatatataataaagcaaaagctgttgtaaatgatgcgtatgcaaaaattgataagtcatcaaagcgtgataaagaagttgaacctttaaaggataatatttcaatattaatcatgggtgtagatggaagtgaaatgagaaaaagccaatatggcgaagcagttcgaacagatgcacttttattagcaacaattaataaagatgataagtctgttaagctagtaagtattccacgtgattcacgtgtttacattccaactagaaaaaaactagataaaattactcatgctcacgtatttggtggcgtagaaagcacacgtgatacggtggaaagatttttaaatgtccctgttgattattatgtgaagtttaactttgaatcattcgtacaaattgtcgattcaattggtggtattgatattgatgtaccagttactttcactgaacaagatagtaaagaccaagctggtatgatccatttagaaaaaggttaccaacatttaaatggagaacaagcacttgcacttgcaagaacgcgtaaaattgatagtgacgcaatgcgtggacagagacagcaacttgtaatagaagcaattgctaaaaaagcgatgtctgttcaatcaattagcaaaatgggctctttactggatgcggttgataaaaacatgaaaacgaacttaacatttgacgatatgcttgctattacaaaaaatatggcaggatctaatttggaaatggaaaaaatgcaaatagaaggtacagataaacgtatcggtggtatttattattacattccaaatgaaaaaaatgtaaaagacatttccaaaaaattaaatgatcatttaggtgtaacgccaaaatcagtccgaaacgaataataaaaaaagattggcttttgccaatctttttttatgggaatgtatttgtaacttttctgtaacgattttttagtttagaaaaattatactcatatgtatgagtataatggataggtaaaaaagtaaaaggacatattcaaaatttgtggtaaggaaagatatcatatgcagaaatggttaagcatgatgggaattatctttatattgactggatgtaaaatgtctgaggctccaacaagtctaatggaagctcctacaaatgaaaaatggattaatgaattaaaggaacaaattgataaagatttacctgttaattatcgcttacttactccaatgtctaacaaagataaacagatgatttggtcaatgaattttaaacaagataataagaaagaagccatcttattttataaattgccgaatgaagatcatagcgtatatttagccgtatatgaagaaatcggaaatggctggagaataaagtccacacataaatttgatggtggagatgtagatatcgttgaagtcggtgattttacagggaacgggaagagagagttgttaatcggaatctctgtaaatcgtgaatcgttagaacatgttatgtatgttttttcggaagaaaatgaagatatgaaggaaatatataatcgaagttatacgaagttattcatagaggatctaaatgaaaatggactgaaagatataagccttgttacatttgaaaaagatgagaagctgacagttgagttcatggaacaatttaagactttatctgaagtgtcatacgatccatttataaatagtattcaaagaatacaaatgggtcgtatatctaaatcactaaaggcggtggtaattgatgcaggagttggcgctcattcaggtataacttatgtagcaaaatttgatcaggatcattatgaagtattacctatagatgggaaagaagatttatttaatgaatatgttgtagaaagtaaagatgttaatgaagacggcattattgaatttgttcgtactgtacgtccaaaaggttgggaagataaatcacatggtgatagtccgctttttgaacgttacatacagtggagtgaatctggaattaaaccaattgaagaacgatatatagatatagaaaaagggtattatgtgaaaattcctaaagagttaatagggaaaattacaataccagatcagcaaaaagaatcaaattctcaaaagtttttggatacaagaacaaatgaaatatggcttgaagttcatatttttaagcggaaagaatggttcaatataaaaggctacagcgcagcaattaaaacagcttctcacgtatatgcagtaccgaagcaatcgaaatttgaaaaagtgaaagcatatataaaaccgctagcggattatcaacaagagtaggaggtgggaattatgtcaaaaattttagttttagaagatgaattaacaatccgtagctttattgttttaaatttaaaacgtgctggattttatgtaatagaagctactactggagaagaagcgttacagattttgagtgaacaaactgttgatatagcactgctggatgtaatgttaccggggattgatggtttagaagtttgtaaggctatcaggaaagaaaataaaaaaatgggtattattatgttaaccgcacgtgtacaagatgaagataaggtgcaaggactaggaataggtgcagatgattatattgcaaaaccgtttagtccagtagtattaactgcacgtatacagtctttattaagaagaatagaagtacatgaagaaaaaacgaatattgttacgtcaggtccattttcgttaaatattatagaagaaagattgtataaagatggacaattagtcgatttaacacctacagagtatatgatattacagtatttaatgaatcaggcttcaaagccagtttcgcgtgatgaaattttaaatatgatttggggaactaattacgtaggtgaaacgaaagtagtagatgtaaatatgagacggttacgtcaaaaaatagaatgtaatccatcagaacctgaatttattcttacggtgtggggaaaaggatatgtgtggaaggaaagtataagatgaaacggaaagtgactctatattttatgacggtcattacacttatgcttgtattatttgaagttgtattttcagtctcaatttatcgatactattataatggtattgtgcaatatatagagtctcatgcgaaaacgagtacacgttttttttcagaatacaattcactatactttattcgattacaagaatatagtggtgacataattagtagctttcaattagaaggaacagaattacagttaattgatcgtcacggctcggttatacaatcttcaagtggtgaaaaggtagaaggtaaagtgaatattccacaatcattattagaaggtgaaatgtataatcaagttactacgaaaggtaataaaaaacaactagaggtgctaagcccacttatacatcaaggacaaactattggtgttttaaaatacacgactgttttaacaaatgtaaataaaaagattattgaaattattacgtttactatttctgtaggtattgttatttcgggagttgccttcttaattagtagacgtttggcaaattcatttgttgagccaattgaatccattattcaagcctcttcacaaattgcagaaggcacattaaagcaaaaaattaaagaagattatcctggagaattaggtgacttggcacatagtttaaattatatggcctataaaatagataaggctgagcagatgaaaaatgaattcattgcttctatttcgcacgaaatacgaacgcctttaacaggaattaaaggttggagtgagacgttaaaaacagtagatcatttaacagaagaagaaataaagcaaggtatgggcattatttcaggtgagacagataggttaattcatttagtagaagaattgctagatttttcaagattacaatcaaatcattttaatttatataaacaaaaggtgcaattgtacgatatactagaggagacgatttggcaattaactcctaaatcggaagagaaggaaattcaatttattactactatagaccgaattgaattgatgggagatcgaaataggctaaagcaagttttcttgaatattgttcaaaatgcaattaagtattcacatgaaaaaagcacaatacacattgaagcgactaaaatagaaggacaagcagtgattaaggtaagagacgaaggtattggaattgctaaagaacatttaccatatattgagcaatcattttaccaaattaataatcatgctgcaggtgcaggtattggtttagctatcgttaaaaaaatggtagagcttcatggcggtgcgcttagtgttacaagcaaagaaggaataggaacaacaattttgataaaactcccattataatacaaataaaatctatttatatggtgaaataaaaataaatagatgtataattatattgggcgatttatatataagattaatagggagaggaattcgatagaatggaaaaagctttaaaaattaaacaaatagtagtcgttttaatagcgattgccgcagtagctattgggtattacatgtttcaatcaattacttcaccagcaaaagctgttgcgaaacaagaaaatgtagtgcagcttgcaagtgaacagccgaaagttgaaatgaataaaacggcaccaagtcgttttaatggaaaagaaagaaaagttgcttatcttacatttgacgatgggccagggaaatatacggctgaattattaaatacgctaaaacaacatgatgcgaaggcgacgttctttttaattggagcgaatgtaaaagaatttcctgatttagtgaaacgtgaaaatgctgagggtcattatgtaggcatgcatagtatgacacataatttcgcaaagttatataaaaatggcgagtatgtaaatgagatgaaagaagatcaaggtttaatcgctaatattattgggaaatcacctaaattaacacgtcctccatatggttcgatgcctggattaaatgaaggtcttcgaaataaagtggtagaaggcggatttaaagtatgggattggacaattgattcattagattggaaatacaataaaatgccagttgatgcagctgcagcacaaattgctcaaaatgtattaacaaacgcaacaaaaccacaagaagtaattttaatgcatgatattcacccgcaatcagttgctgctgtgccagcaattttaaaagggctaaaagaaaaaggttatgagttcgaagcttatcatgaagaaagtcacttcccagtgaacttctggcatgataaccgtatgtaatggaggaatgaacgttgaagtatggaaaagtagcagtagttggagcattatcagtaggacttttaacaggttgtttcggtgaaaagccagaagaaaatctatatacagcttttgaaacagcagcaacacaagaaaaatctttagtggatgaagcaaaaaaattagagcagttagagaaacaagggcaagaattatatgctcaaattttgcaagaaggtaaagatcataatgaagcagttgtgaagaaaatagagcaagctactgcaaatgtagatgatcgtgaaaaagtattgaaaagtgagaaagaaatgctagaaaaagcacagaaggaaacgaaatctgttcaaagtaatatagagaagattgaagataagaagttacaaaaacaagcaaaagcagtagaagagtcgtataagaatcgttatgatgcattccaaaagatgaatgaaaattacacgaaagtgttagcgactgaaaaagaactgtatgaaaaattaaaagtaaaagaaacgaaattaaaagaaatcggtgaaaaagttaaaactgttaatgaattaaatgtggaagcacaaaagtcgaaagagcagtttaacaaatttacaaaagagtataatgacagtaaattagcattctacaaagatgcagaaattaagattaaagatcagaaataaagaagaatctaaagtgtaataaaaagccggagaaacatcgttataaatgttttttcggttttttacgttaaatgaatagaaaagactggaattgatatcataaaagagttatagtgagttattctaagggaaacattgtaaagtaaggagaatgggaatatgtcatatgaatttttactcaaattaggtttagcactctttttaggattattcatcgggatagataggcagctaaagaataaaccactgggtgtgaaaacaagtatggttatttctgtagcaagttgtttaattacgatggtttcaattgaatctgtgcatgtatattctgttccaggacatacaaatatggatccgatgcgactggccgctcaaattgttagtggaattggttttcttggcgcaggtgtcattttacgaagaagtaatgacgttatttctggattaacaacagcttctatggtgtgggctgcttcagctttagggatcgcaattggtgcaggattttatttacaagcgacagttgctatggttttaattattttagcgattaatgtacttccgcaacttgtgaaaattgcaggaccgtattcattaagacaaaaggatttatctataaaaattactgttaaagagcatcatgagttagatggtatatttaagcaaattaaaaatttaggcatgcatgtgaaacgcgtgaaaattaaagatatagatagtggagcatttcagcaactggagatggttattttagctccagaagatttatatacaacagagttatatagttccctgaaagagattgatcgagtagtttcagttgaagtggaaagtagataattgtgataaaaaagagtgaagtgaattcactcttttttatttggatttttaaggaatgaaattgatataatgatgagtaataaggggggagaaatgatgggaatacatattagaagagcaataaaggatgatataccaggtatagcaaaggtgcatgttgatagttggaagacagcgtataaagggatatttgctgacgaaattctagataatatagcatatgagaaacgagaaaaacaatgggaagatatttttcaaaaagaaggtaatcatcaatttagatttgtagcagagaatttaaatggagaaatagttggattcatcgatgggggagtagaaagaactggtacatataattgtgatggagaattatatgcaatctaccttttacaacagtatcaaggaatgaaaataggacaaaagttatttcaagctttattatcggattgtataaacaatgatatgcaatcacttttagtttgggttgttacgaataatccttctaaaaagttttatgaaaaatttacccctgaaaaaattgatacgaaatttttagagagagtaagggtagaagaaacagcgtattgttggagagatttaaatttgttacaaaaacaaacagctatatagaattatacatataataatattatgtaaacatattatagggaaaggtatacctcatttggtgtacctttttattaatccatcaaaaaatggattaataaaaaatagtaggtaattagtttgaaagcaagaaattttctagtgtacttttaactagattaaagaaaagaaagaaaaaaataaaaatttaatttgataaaaaaattctgaaatatactcttgaattgaatatcattatcaattataatatgaaattccgatagcgttaatataaagaggaggaactaacagtaagtgaaaacataagtaaacgtggatatgcgtaatgaaaaatataagctcgatgactgcatggagagaaatgtttcaaccatcaccatcgcacacaaagatagggttttccgttttgattatgattggtttgatggatttcttcataagttgggagtcaaagttatcattgttactaatgaaaggttgtctccacaagaagagtttgcttagtatttgatatctgttattcacatatttagttgtaggatatacagattgaggaaatacaaaaagagaatgtcggaggatgaagatctatgaaaaaagcatatctaatagagattaagccgacaaatgaacaaataaccaagatccatcaaacgattggagtgtgcaggtatgtttacaatctatatctttcaaaaaacaaagagatatatgaatccgaggggaaatttcttagtggctatgaattttctaaatggctaaacaacattcatacaaaagaatgtgaccagtggataaaagaaatatcaagtaaagctgtaaaacaagcgattatgaacggagataaagcttttaagcgattttttaaaggtttatctaagtttccacgctacaagaaaaagaaaaatgaagatgtaaaatgttatttccctaaaaacaacaaaacagattggatagttgaaagacatagagtaaaaatccctacgattggatggatgagattaaaagagtatggatatatttcaaaagatgcggttgtaaaaagcggaacgatagctaaaagagcaggaaaatattttgtatctgtgctttgtgaattggaagaaacaaaagcgaagccaacactccattcaacgggtgtaggcattgatttaggcgtgaaagatttcgctgtacgtagcgatgggaaaattcacaaaaatataaacaaaacaggaaaagtaaaaaagatagaaaagcggttaaaacgtgaacaacgctctttatcacgtaaatttgaaaatctaaaaaagagaggtgaacactctgttactaataaaagagcgaatatagataaaaacattcttagggtgcaaaaactacatgccaagttagcaaacattcgattagcgtatgtaaagtctgttgtaaatggtgtggtgaaaaccaagccaacgtttattacagtagaagatttgaatgtgaaaggtatgatgaagaataaacatctatctaaagcagttgctaagcagtacttttatacatttaaaacatggttattgacgaagtgtgaggaatatggaattgaactgcgtcaagtagacaggttctattcatcttcaaagctatgttcatgttgtggtcaaaagaaagtagacttaaagctatccgaccgagtatatgaatgtgactgtggaaatgtaatggatagagatttgaacgcgtcaatcaaccttttacaagcaaaagaatatataatactaacgtaaatagattgtatatatgtacggtgggctacatcggaatttacgcctgtggagtgttacagcaaactgtagtagcgagtgattggcgagacaggacacgtagaagcaggaatactctaagaatgtacatttatctatatttttagtagcaggaccaacatgcagcatgcgaaacaaatcgcagaacatgcaacattacaaagctttttaaactgttatttaagagaaacagggagtggagaatggattacagaggatgaaagaatgaaaagtatcttcagtaatacgttgaatagagatacagtccccacatatttatgttgtcggctatcggcacagaacgttactttgtatggagaagttatatataaatcatcaacagatcgccatttgtttggagaacaattttattatcaaattggagatagtaattccgttattacagcagattacgttacagttattacgtttttaataaaagagatgtcgatcaactacggagaaggaacgaatcctgcggaacttatgcttcgagttatccgtagttgtcaaaatattgaggaatttacaaaagagagaatagaagatacatccgcattatacggtttccatacaacttttatagaagcggagcagtctttattatttgggcatttaactcatcctacaccaaagagtagacaggggatattggattggaaaagtgcaatgtattctccagaattaaaaggggaatgtcagcttcattattttcgggcacataaaagtatagtaaatgaaaaatcattattatcagattctacaacaacgattataaaagaagaattaagtaatgatgagatggttagtaaggaatttatagcgaagtactgtaaggaagatcaatatgcattaattccaattcatccgcttcaggcagaatggctcttgcatcaagcttacgtacaagattggataattcaagaattgcttgagtatattggtcctgtaggtaagtattatatggcaacatcatcactaaggacgctatatcatcccaattcgaagtatatgcttaagttttcatttccggtgaaagtaacgaattcaatgcgtattaataaactgaaagaacttgagagtggtcttgaagggaaggaaatgttaaatacggctattggtgaagtacgagaaagatttccaggatttgattttatttgtgatccagcctttattacattaaattatggaacacaagaatctggatttgaagtgattattcgtgagaatcctttttatagtgaacatgcaaacgacgcaacattaattgctgggctagttcaagacgctatacctggggagcgtacgcggttatcgaatattattcatcgcctagcagatttagaaagtaaaagctgtgaagaagtaagcttagagtggtttagacgatatatgaatatttctttaaagccaatggtatggatgtatttacagtatggtgttgcattagaagctcatcagcaaaatagcgttgttcagctaaaagatggttatccggtcaaatattatttccgtgataatcaaggattttatttctgtaattcaatgaaagagatgcttaataatgaattagctggtattggagaacgtactggaaatttatatgacgactatattgtggatgagagatttcgttactacttaattttcaatcatatgtttggcctcattaatggttttggcacagcaggattaattaaggaggaaattcttctctcggaattaaggtctgtacttgaatcattccttccatataaccgggaaccttctacatttttaagagaattattggacgaagataagttagcgtgtaaagcaaatttactaacgagatttttcgatgtcgatgagttaagtaatccattggagcaagctatttatgtgcaagtacataatccactcgttagagaagtggctgttcgttcataaataacgttaaaatttcacgtaatacaaataatggtattttgtcataaggtggagggttttatgagagtggacatatatcatacgaaagtattgaaggcgctcgaatcagaagattacatttcagtacgaagaagagtgctacgtcaattagtagaatcgttaatttatgaggggattattacaccggttcgcatagaaaaagaagaacaacttctttttctaatacaaggacttgatgaagaaggcaaaagtgtcacgtacaaatgctatggcagggaacggatgacatttggacgtatttcgttagactcattaatagtaagagttcaagatgaacagcaagaaatacaatctgtctcgcaatttctagaagaagtttttcgggttactagtgtagaacaagctaaattagattcttttatacacgaattagaacaaacaatatttaaagacacgattgcacaatatgaaagaaataataagagagaatatactcaaaaatcttacgatgagttcgaaagccatttaatagacggccatccatatcatcctagttataaagcacgtgttggatttcaatatcgtgacaattttcaatatggttatgaatttatgcagccaataaaactcatatggattgcagcgcataagaattatgcgactgtaggttatgtgtaaatgtcaagataaacatgtacattttcgcttgtttaagcatgtacaaaatcttcacgatccgttgtcgcatactctaaaatacaccccatcggacaagcaaatgcacatttcttctacatatttaaattggctttttggtacttccttatttcgttttccaaatcggtgataccccatcaccataaatatatttctctccgataatttcttacagatataccctgtaaaatagcctgcatcaagagctactgcttccactttaaatccgaatttatcaatttgagcttgtagacgcgctaaatatggctcggaatctgccatatttccagccgttaaataagtatctgtaataatattgtacttcgcatcagtcgtacgatggtctaaagaaatgaaaaccgttcggttttccatctctcattaaaaatccactatctggatccgtagtacttatacgagtttttttagtgggagtatcactttcctttctgggttttaattctttttttcgtgtacctcacgatcttcaattaccgcagcttctagttcgtctatgtaaaaattttccttttcttttttatatttatatacaaacttatttttattagcattggccttaatgtgcgtagaatctgtcatcagcgcacgtcctcccaccatccggtactctgtcgcttgcctcacaatctcatcaaaaatttcttagaaaatatttgtatgaataaagcgagtacgacgattccaactgattgtagaatgatctggaatagtatctgatagagaaaaccctaaaaaccaacggtaggcgatattcgttttaatctctttttccaattgacgctccgaacgaataccgtaagaatatccaataaacatcattttaaataaaacgataggatggattgacggacgtccattgttttcacagtaataagggcgtaacttcccttcaataaaatcaaaactaattgtcgcttcaatcgcacgaaggaaatgatcttgtggaaccaactcttctacagaaacagatacacgttcatcacgatgattttttaaagcacccatcataaaaagaggttcagacacaaaaacaggctgtggagaagactttctccacagcctgaagataaacgaaaaaaagttctactcctattgagtagaactttttttcgtttatctcggtaaataattaagtaactgtaatatttctcttttaaattttggagttgcttgttttagtaatgatggtacttctctaaagtgatttattagggctttgttaatttttgtagagtaatcttttttatctcctgtaagtatatctactatatctttttttaatggattactaactttcccccacaaaaattctgattcctgaaaatgcttattaataaaaattttgacttgattaataaaagggtcatttttttgctgtatagcgtcttgtaactgcaatattgatatgtcataattttgagttacttgtttttccttcacatgacttatattctcagccgcacttacacttgatccgaaagcacctaaaccactaaccccaattacacctgccaaagcaatacttgtacattgttttactaatgatttcgatttaataactttcataacgcttcccccatttataatttagattttcttacagttaaattttaccatgttttttcacctgattaactgttaaatgttacaataaaacgaattattataataattatatattcataaaataatgcaattaactttttcaattacatgtccatttttagcaagttgatacttttcgttatatcccttttactacgaccatttctctttgcacaaattcattcaaaagattggactgattacacctttacttttttaaacagagcgagaatataattaattgcatagcttttgaatgcaactgttaaacaaaataataagatgagtagactgacgcccattatttccacaataatacggacatccccctcttcaatcaaatttggtgcggtttttattgtacaaaactaatacacaattcccctatatttttcatataaatttccataagaaatctctcctgttcctctctttaacacacaaaaacaaattattccaaaaaaataaggatgtggaaaataccttctccacatccttgaaaaccgtagcttgatttcaaactacctctttaagttgaactatccccactttcacttcgtttagaagtgggggattcctaagtaaagggttctatcgaactctaattgattaggctatctccgcagtccttgcggttagaagccttatcgcttcatgctttagattgatacttgcgttaatatccctatcatgatgtgtttgacatgaagggcaaacccatgtacgtaggtttagattcttaacgtctttattttgatatccacaacaagaacatagttggctggaagcaaatgttttcgatacgacaatgacttgttttccgtaccattttgctttgtattctaacatggttcgaaactgtgaccaggatacttcactaattgcttttgctaacttatgattctttaacatattcgatacttgcaaatcctctataccgataacatcgtggtttttgatgatttcagttgaaattttgtccaagtaatcttttctagagtttgatatgtattcatgaattctagctacctttactcgttgtttattccaacgagaagatcctttcattcttctagaaaggacacgctgtgctttcgccaatttctcttctaatactcgaaaaaattctgggtttttataagttgttccatctgacataatggcgaaattttttagtcctacatccattccaatgtaagaacttgttttcggaagttcttgtacttctgtttcgactaacaatgatacaaagtatctgccagaaggattccgtctaactgtagcatttacaatacgtcccgttatttcacgacttttggcaaatcgaacaagacctagttttggcaattttattttgtttcctacaacggcaatgttttcatttgtttgttttgtggtatacgattgtacgttattcttcttatatctaaagcgcggggcgctgtttgttttttgaaaaagcgtgtatacgcatccgcaaggttgcgaacagacgactgaatcgcaatactgtccacttcttttagccaaacaaactctttcttcatggcaggaagcttggcagagcatgtaccatatgtcaaaccttttcctgtctctttaaatgcgtgatcccatagggataggaaatgattgaatacaaaacgagaacaacctatcgttttgttaattagaattgcttgtgcttgatttggatagatacgaaacttataggctttattaattatcatttaattcacctccatttcggtatatgactattatacaccaaacgtacattcgatggatagtgaagtaacaatttatgtatgtcgaacaattaagatggctccttgccatcccttgttcaaagccaattcatctcccacctactcacttcgcgttccttgaggaaggagtcttcttggctaaaatgataaagtctgtaaagcttaaacttagaccaaaaacaaacttaattatatctaaaaatcacctattttataaactcatcaccattattattaaattcaaaatataaccccaaaaatttttctaatatttccgatttattgtcttttcgccaagcaagtgacgcctcaatttcagtatttatatcctcaactttccgttgtattaatccatttaatggattaattgatgaaggtaataatgctacccccatcccatttgcgactaatgctgaaaccgtttgtagatcatttgcctggacggttattttcggtgcgaaaccaacattttgaaacaggttcataaacgtatcataataaaatggcgccgctgatctagttgccataataaaaggttcattttgcaaatcatgaatataaattgattgtttgagcgcaagaggatgtttttcaggaataatagccttaaatgacacctttttgactggccttacatgtattttactactacttattggtgcagctaaaattcctatatcaatttttttttcaattaaatttttaacttgaataggtgtactaagttgttgtaatacgattccaactttaggatatctttcccggtatctttgaatagtttggataagatcttgtactgatccactgaatcctattacaagttcaccttcagtcccggtagaagttaatcttgtgctgatgcatgcttgttcaacttgatcaaggatttgataagctttatccagaaatacctgcccagcattagttaactccacatgccgttttgtcctattaaataatttagcaccaatttcctcttctaattctttaatttgcttactaagaggtggttgggcaatatgtaatttttccgcagctcgactaaagttcagttcctctgcaagaaccagaaaatatcgaatgtgtcttaattccatttatcattcctcctccctagtacttatacctaaaaggtattaataagacactttttaggtatttctattaattattaattttgtttaatattaagtcaaggtaaaaacattactattagaatgggtgatagcataaattacttccaataagcagataacctattattagtttttgaacctaatcaaatgctttttattttaattacctctaaagttttgagataagtgaaaattttggttctttcattgcagcactttcctttaatctcttcctaatcccccacaaagttttaagcagtggtattagtggaattgcaatcattattggaattttaacaccctttaatactggatcagttaatttccttttaaatttacttatcataatattaggttatattagacttgaaaaaaattcatagggtatacaattttatcagttatcacattttcgacagcattatatgctattccaatacatgtagtgacaaacgacgtactcctttcttcattgtttggtggcgttattgctggtataggtattggacttgtattcaattgcaatgggtcaacaggtggatttgatattatcggtatattgctttcacgaaaaaaagatattcagcttggaaaattcctaatcgtacttaatactattgtcgttattatctctggatttttcttcaattgggatattgccttatacagtttagtatctatttttattacagggaaagtcatagatatgattcacacaaaacaccaaaaaattactctaatgattgtaacaactcatgtagaaaaaatgaaagaaaactttctttctaactttgcacatggggtaactttattaagtgagaaaggggcatactcaaatgaaaaaaaatatatattaatgactgtaatctcacgagtagagctagctagaataaaaactataatttctgaagtcgatccacatgcttttgtaaatattacagaatcaacagaggtattagggctatttagaaaaggataaattagaaaataaaagaaatgcgtataatcactttcaaaaattctgtacaatcactttcaacatttattagtaccgacctacattcttctctttaatatactaaccattgtttgtgtttatataaaaaccactttgaactactcaccacttaatattcttacagactttttgaagtgggagattcctgcgaacaccgatgtatccaccggttatcttagcaggctatgcccgtagtccctacggtgaaaacataagtatcttatacgttgactcaccacgcttcctactttagcttggttttcgcaacttcagtaaacgtggggcgaaagaacgttgaagattttacggttgcaacgtttttctacaaccaacctcatatcttcagttttcaaagagcaatctgtacaagtctatggtagcaaacatgttggcttataccaaccgacattcatctcccacctaaaattggtgtttcacaccttaacacttttgaggaaggagtcttctgtcggaaaacgataaaacattgagtatagttcagggatgattaggagaagatgtagtaagcgaaaaataatatagttttttatttaaataaattattaatttacttttaaattgaggatgataattatatgaaaaagaaaacggcattacttaattgcactattataaacggcgacatgaatcgagaaattgaaaaagatatggttattctagttaataatcttggtattatagaaaaaattgaaaaccgtcaaaatataattattcctaaggaatatgaacaaattgatataaaaaatcagtttgttatgcccggactcataaatgcacatgcacatttattttctgatggaagccctacaggactatcttttagtgaagaagtattaaattttggaattaagttattagatacaaaattaggaaagaaatttatttacaatagaatgaaaaaaaatgctctagtctcatttcaatctggtataactacacttcgctctgttggcgaatttttctatcaagatgtgaaattgcgtgatgatatacaaaatgaaaaattgattggtccagacctaatagtttccggtttctttattagtgccacaggtgggcatggggcaccatatttggccctagaaacagacggtccttgggagggtgtgaaaaatgtacgaaaaaatgtacgccaaggtgtagatttgatcaaaatttgtgtaacaggtggcgtcacagatgcaaagacaattggtgaagcaggaagaattcagttaaccgaagaagaagtatacgctatttgtaaagaagctcataaaattggcatgatggtagccgcacacgtagaaagtaccgaaggagttaggattgctttaaaaggtggtgtagatacaattgaacacggcgctacgatggatgaagaaatcatttctctttataagcaaaatccaaatgccttacgaggatatacgtcactgattccaacatttcaagctgcatacccctatacattactagacaggaacataacaaatatcaatgatgtactttttgaaaacgcaaaaatcgtgtatacaaatatgatgattagttttcaacaagcaattgataatgacattagtgtaggtgtaggaaatgatgcggcaatggcttatgtatcacactatgatctatggcgagaattggatcatatgattcgttttggtggcatcaatgaaaagaaagcacttcatttggttacaaagagtaattcagaaattttaggtattagtgaaaaagtaggtacgatagatgtaggaaaaaaagccaatttattagtattacctgatgatcctataaagaacatcaaaaatttatcaaaaataaatttagtaataaaaaatggtgttttatttgaggatttaaacataaaaaagaacgaaaaattggataatatattggatttaatttaaaaggattttcttttccttaaaaacaagatatcatatggatttcgttttccaaatttatgatattgtaaaataatatgtttcatcaaggagctgacgcttaaacatctaaacacaaatcgatcggtttgtcatgagagtggcgatgtcacaccaccaacttgcacgtcagcgataccagaaatggaattcgcctttgttagcaagaatcccaatgatgttagtcagcttgcccctttagggggaagtgtaaaatgtgcaatgtcagccacattaaataaaatatgttctcccatttttcatttaattattcttatatatattaatctaaaaatcttctccttatttctggcggaggtagttgacaagtatttcgttttccaaataacttatatcgatttttggagaatttatcatataaaaaattacgaataaactttggaattaataatagaaaaactgctagcttccaaggataatccaactctttacaaatatttattacagcatctgatttaatataatatttactatgtttaattaagactatactttctatgtttacatctatattatatcgttctagtaattctcttccgacatcccctctaagtgaggcgtattgaaagttaccaatagtgtctcttttaataataaattgtacgctttggttacaaaaattacactctccatcaaataatataatatttcccatataggtctcctttctgtatccaatacgacagtaaaattataaaattgacatcaatacagatttattatccgatacttcacctattcaaaactataaaaacagttgtcaactaaacatatgttaacaactgtttcatttattatctcaaccgacttaaactcatttgtattgtttgccaaaaattagaaattaaagatttacaacgatatcgtgtaccaataaatcattagataggttatcaccattcatagatttaccccatgtattaacagctgctgtagctaaatacactgcagcgccagcaacatatactgcacctgcagctacttgagccactactgcagcgtaataaattgcaactaatccaagaactgcacaacgcccagttccagtcccatcttcagccacttctaggctagccgatgaaacgcccatatctttagtaatatctgttaaaatttctccacctttatttaaggctttttcaattttttgaggattattagaataaaccgcagcttctaactctgctagataagaagcatctttttctttaacttttcccactaaatcattagcttgtttttccatctcaggagtatttgtagcttttcttaactccttagaatagaaattaggtaatttttctgccacttttccttgtccaaagaataatcctttaaataattcttcaccagaaaaaacttttacacttgcctctgttacagcggctttagcctgcatacttccttgaaacattacgcccattaaaagagcaaaactcatcaatgatgctacaattttcttcattttatttctccctttttatagaataagtcggtgataaccactattaagatacaaattttttcttatctaaaatgtccttttcacttttagtcttaagagaatttaactttgatataaatttaaattctctatttaatggataataggacaaaattaaacctgcacacataattatcgaaaagctatgtaatcctaaaactatagcaataccagcatgtaataacacacctgagtaaagatatattttccaatatttatttgaaccaattagagaagctgctaaaaacagttctataattgtagtaccccaagttatgaaaaaaacaaaaggtgatgccagtaatggatttataagattcgctaaggtgctattcaaccccagcataggatcactaaaatagtaatatactgctgttccatctagccattcaggattcttcaatctaataattgctgcttggaagtagatgaaagacatttgtatctttacagcaactaaaaagactaaagatattattctaaaatgcaattgagaattggatgttgtttcttttaaaccagtctcccaatgccattttctcttatctaataatgtgactgggattagtaacaaagtcagcacagttgcgacttgttcaccgccatcaagagttatagctgtattttgaattgaagacgcaacccaccaatgtaaaacacctgtgtaccttggtctccatccagaagcaactaatagtaaaatcaaaactgctaaccacttaaatagccctaaatatgaaccagaagctaggcaaaatatactaattgaataaattgagcatgctggaaattcttctacccccgcaacaggcctgaataatgtagaaacatcattaaaaattaaagtaactaaggtagataaggctattaacgacctggctactccataaacactagtccaaggattattagaaatcgcccaattataagcaaaactatttatttttttgaacatattgattccacctttacaaattccgaagacatttctgaaggcgatgtaattcctgcccaggcccaaggtactacttttcttgttactagtgtataatccccacataaaattggtttaggtgttggatttttgaccttcactctttcatgtgtttttttaacacatatatcaatatcttcgtcacatttattgaatttttctttttgtacttgtgccactagtaatcccatttcaatcccctgtgatctaccaccacgatttataccaaatgcatttttgatagtgttatttggccaacccacagcagattctccattctcatctaaaataaatgtataatcatcacgaggtggcttactaaaaaacccccatccttgtgggaaaattttcattacagtaaaactctttaaattacttataggatttttaggtaagctattttgagatcccatcagaaataaaataaaaataaaaattcctgttaaaacaagcgtagaaccgtataaccgtttcatatacccctccaaatttaataactataataagaacaattaattaagtagctaattaattaattgatacaacattgtaactcttttaatttttatatacagattatttgctacacactgaatgatatctttagacacaaaatttcacaaatttatcacaaatagtatattaattttataaaatattatgttttacaattactaagcctaatttccccacactaaacaaactgcatctaaaataaattacactattggatataatttccttggaagtatggtgatttaattcacatttttttaaaaattaatacattttttcataaaatccaaattatagttttctacgctattaattgtaaaattaatagccctttcatttcacaaaaaaagatgacctattattatagatcatcttttgagttctttatattattttacttgtaatcaactttgtatatttttattctcaattttcctaaaaaatatatatgaagaaaacacagatattaaagcagcaattgccacaagactaatcatacttaaaattacaaatttcggggttaaaattgataatagtattatcattaaacctgtaataaaaaagatttttgcagagaatcgattagttaatctccatacttccttattctttaatgtccaaggggttcttattccgtatatataattttgttctactcgctgcataaagttagataaaaccataatgaatataccagttgctatacccactactaattcaaaagtaatagtatatccaaactcagtacttacaattactaaatgaataatacataacaacattaacattgcattagaaatgattcttaaatcaagttgattttctaggtttccctcagttaataatgtatttttcactaatatattaaatattacatttgaaataagcattatcgtgggcataatgcttagaatccatatcttctcatcccctaatttaaaataagatatgaaacttaccactaaactaatcataataataagatatgaacatgtttttttcctcattatttattttcctccccgattttaatacttataagccaattcaaaatatcctgaacaacggttgtatttaatgtgtaatagacatacttcccttcttttcgatttttaactaaatttgattgtttcagaatgttaagatgttgagaaatactgggctttgacatattgaaatgagaagctatttctccggcagtaagatctctctcctttaacaaatctaatattttccttcttgttggatctgctaaagctttaaaaagatcattcaataaaaatcctccccccaataacatttaagtatttacttaaatgttatgtgtaagaataataaaaatcaagtaattattaaatttaatataacaatgtagtatttttacattcatggtgcataaatcttaaactattctttaacattgctatatctagactcctggtaccacaattgtaaaatattagttacatatttcacaattgtttttgacaaatatgaatacaattactaattcaatagaatatttgtgtctattgaattagtatgtataacttgaatcgtataaaagacattaaaaatatacaatcaaaagtaaatacaataaataaagtaatggaaatgaattattttcttgatattttgatacatttttataaaatgacataaatcaaaaaaagaattttcataaattctttttattcccttgttgtaagcgctttacatttatgataccatcgtatttataagatagatggtaataagtcttgaagtagttctttacttaagacgcgtgtaaacgtacggctaaatcataaaaataggccataggtccaataaaatatgggctatcttataaattaatcaatggaaatttcatcgctaaaaatactgtgaactcagatataacagctttttgttatgtccttaacaaagttttacaattcagcgggaaaattctcgaaatttaactcatccaatttaataagctaaattttattctgtatccagctacgagacgtgagcaaaagaattctaccaacaaaaccgagctaagtaattaaagatatctaaaattttatctttatactgtctatagttgataacgtatttccaaacaatctgaaaccttttttgatttttaaatgtataaacgaattacttaagacttatttacatagcctctgaatgaattcttcaaatatttatttggatataaatcattaatcattgcgtatggacttccattccaatatttcattaatggtgtccataacctatgactttttatccatctaattgtatatttttgtagtaattgttcatctgttaacttttctctttcttcaattgtccaccgtaatgcatctagtgctttttcctttgtccaaaaaccattaggagtcatcttaaattcccattccttaaattgattgggatataaatcattaatcattgcatacgggctatcctcccaacataattgacaagcgcctttcaatccagattgaattagccattttcccccgtaaatatttctcaattcttccagatctaatttttctttttcttcaattgtccattttaatgcttgtaatgctttttctttcgtccaaaatttattaggggatttagtaaattgccattccttaaatacattcggatataaatcattaatcatcgcatatggactcccatcccaaaatacccttaatggcgtacttagtttttgttccttcaaccacttttgcccataaattcgtaaaattttttttggtaataatttttctttttcttcaattgtccattttaataattgtaaagccttatttttcgtccaaaaatttaatggagtcattttgaattcccattccttaaattgattagggtataaatcattaatcattgcatacggactattttcatatctatgctgcaatactccacgtaatcgatattttgcaattaaagagacattccaattttgctttatctcttcttcgttccaatttaaaatttcggttaataaatatcttgttactcttttagccatttcattattctcatcccacctccaagtattggatgggaatctacttctttttccatccaatatctcctgatagatttcttctatagtaactgcttttatctgcatttcatactcttcccctcacactatataaaaatttttatttctttatattaagattatacaaatataaaaactaattacaataattacttatattaaaactataattcctaatgaggatgatcacatcaatatccagttaaaaaaatcataagttctttctccaaaattataggaaatgatgtctttatatcaccattttttgtatataataattagaactattctctcaagaaattcaaaacttattaactctaaattttttacaagctcttccaggagatatgaattttatgtaacaaaaccttaaatacctagccggggtttagtcgttttatatgtgtagactaaaacctcttcaatctaagtatgtagctgtttagaagtaccaacgatttaataccacatctatatactctttatacaaaggttagccaaagtaatataaaactaagtgaatctctttcccatacacctctaataccagcatatccatacctatatttttataattttcaagttccagatgcatacacatctactaatcctcatgataggagatgtagtcagtcctaaagctgtaataaaaatcccattagagtatgactaattaattgaaaatttttccggcgtgaaattcaaagaattatttatatctaactcttaaaataaacaaaaaaaaagatgagttatatattcttcatttaatatattttcgtttactcgaatttaagtctatctaaaataaagataaatattatttatcaatctttaaattaccaacaatatatataaatttgaaacagttatatttaaaacaaaatttgtacaatcgagtctaatatatatttgaaaaaccttttgaaacaattaaatgatatatataaggggcaacaagaaactacatactattagtaacttcttttcaaaagttttggacataatgatctcgtaaatcaatttgttttttgatcatgtgcatagcttcgatgccacttaaaattaaagtagctgtacgaagtaacttcaatcctaacatagaacgaactcgcttcttgataaaacgatgatcttgctccactacattattccagtacttctgttgtctaaattacataccgacaggcatgtttttctctttttctactgttcaattgctataggataagccggattcttatccaccgtaatgatgcgaggcttagaaacatgaaaaggccaaaaagctttcttgaagaaacgctttgcattctttgtatctcttgtttcactgaaatacaaatcaattgtgttgtattcagaatccactgcacgaatagatacatccattttgatatatgtttcatcgactctccgggagtcatttgttgtcttaaagtgactccatactctttcatcattccgacccatattgatgaacctacgcataatggttatatgagccatcgatatgccacgctctttcatcagctgcttaccaaaaatggtttgtatagaatgcgacattacacaatgatgtgtactcttaatttattcaccaatccgtgacttaattggattcatgacaaagatattatatgttcgtgcaatttcataaacgtgctgactatcataagcagcatctgcaacggaaacaacgcattttggttttgcataccttaaagcaatgcaggaaccattttacgttcgctgttgtaaatgcatacgacatctggtgtagaacagacatgagctttatatttcttataccaaccataacgagtagactattctttgtttgagaatcgtataaactcctccgtaaggccatactatcgattaaaacacagggaatcaaacctaaattcacctcttgaagagtttgtttatgaatcaatggaataccttcgttttgaaaccaagttacctacacgtgaaaaagtagagatacgaggaacaaaaggaaagtcacaaaatacaagaaataaaggatattgatgcaaaagacaggttaatttacgtaaagtttttctataaatgagtggacgacctgtaataggcggaacttctccaatgattaaactttctacatacgcaaataaaatttgtaaaatggatttttttgatcaaaattggttatcatactagtaaatacatcctttccagtgatagtttgggttactatcattcttccaggaaaacggatttttttatgcattcatttttggatatttatgagttctgcaacacctaaattttattaaatatcatgatttgcttaaaaatttgaagcgtgcgaaactagagcgtcgtttagaatcccaattgaaacaatatataaagtacaaattacttatcattgctgaaatcagatatttaccaattgatccggaggatgcaaaattatttttcaattcattgatatgcggtatgaaaagcgtagtaccatcttaaccacgaaagtaaatttcaaatcatgagacgaaatttttcaagatcctaccatgctaacaaccgtttcttacatcatgccacggttgttagcatggtagggtaatcgtatcgaattaaagatcattttagtaaagaaaatgattaaatttgtacacgcttaaacaagtgaaaatgtacattttaatccttacatttatataaaaaaattatgacaaataatttttttgtatataactcagcatttgactatgttaattaaacttaatattggtatatgagtccaaaaagaaaattaatctaattgcctaagactacttatgtacaattgtattatttactttagcaccttgaataagctctctttttatgattttgtaaaaggattccacaaatgcatcgtcataaagggttcttttctacagacacttgaaaaagcccattctttttgaatgtagtttgaaaatacaacttgtatattaagactcttggtctttatgaataattccccctttttcttcgacttaagggcctctactccttttggttgttgttgagtgcgtattttctaataagcccagatgaagaaatattaaaaataactgccgtttcgtttggaacggcttattttcaatcctataattgtgtgacacgttcctaactgaaaatgttaggcgctgattcgatattcagcagaactattatctaggtgccacggaaactgtcatgccctgttctaggagaggtagttagaaaaatgctaaacttttttagtaactcgctggctacttactctccctcacgtacggtgtaaagtgggggataagggggggataacgtcaaaaccttacctatcactattaatactatcttttatattctcacttccatctttgataatgtattacagcatttgtttttcttctagagtaaatttaattataaagaaactataaccccaattgttagactgtttttaacaattggggtgcatttaatatttattatacctctgtcattataatttattaatacaagtaattatttctcatttttccaataataccccattattttagctgacttcgcaaagaaatctatatatacctatttttttgaagaaaaagcttccatttttaatgtttttattccttcttttaatgtaaacgcatctgctcttaatgttttccaactatctttcgctgcattcaggttaggttttaagaatttaaatttattttgatctgctttttgggatgctttatcaatatgattaagcactcctgaatattgagaatctaaatcatgccattgtgctgacatataggtaagagcattaatagctgatccaattgcattttgcatttcagtaatattattatacgcaactccaactacacgatttaatgttattttatagtctacggtttggcgtaattgcactaataacggctctaacgtacctaaattatttcttgctacccctatcatcacacctccagcaatccatgtagggattgaaggatatgatacagttattattccatccgattctacttgtttaaaatgtcttatttgctctaaaacatcatttaggcgtttttcatcttcatctattccagatgcttgattttttaaaatcgattgcaagaaaataccctatagaatagacttttttcaagtgtctattctatagggtacattttatatgagcagcctctttttcttataattagaactggattttcttctctaagaaaccttttagttcgctaattggcatacgaacttgttccattgtgtcacggtcacgtactgtaacagctttgtcttcaactgagtcgaagtcgtatgtgatacagaatggtgtaccgatttcgtcttgacgacggtaacgtttaccgatagaaccagtttcatcaaagtctaccatgaagtctttagctaattctgcgaatacttcagtagcaccttcagatagctttttagataatggtaagatagctgctttgtatggtgctaaagcagggtggaaacgaagaactgtacgagaatcgttttctaattgctcttcttcatatgcatcacataagaatgctaatgttacgcggtctgcgcctaaagatggctcgatgcagtatggtacgtaacgctcattcgtttgtggatcgatatagttaaagtcttcgtttgagtgttccatgtgacgttttaagtcgaagtctgtacgagatgcaacgccccaaagttcgccccaaccgaatgggaatttgaattcaatgtcagttgttgcattactgtagtgagataactcttcttcaccgtggtcacgaagacgcatgctctcttcagacataccaagtgaaagtaaccagtttttacaagtttcacgccagaatgcgaaccactctaaatcttcaccaggcttacagaagaattcaagttccatttgttcaaattcacgtgtacggaatgtgaagttaccaggtgtgatttcgttacggaaactcttaccgatttggccgataccaaatggaagctttttacgcatagagcgttgaacgtttttgaagtttacgaaaataccttgtgctgtttcaggacgaaggaagatttcgtttgtgctagactctgtaacaccttggaatgttttgaacattaagttgaactgacggatttcagtaaattcttcactaccgcaatcaggacattttacttcatgttctttcattaagtcagccatttggtcgaaagtaagaccgtcaacaaccatttcgatgccttttgcatctaaagcatcctcaattaatttgtcagcacggtgacgagctttacattttttacagtcgatcattggatcgttgaagttaccaacgtgaccagaagcgatccaagttttagggttcattaaaatagctgcgtctaaaccaacgttgtgtggagattcttgaatgaattttttccaccaagcttttttaacattattttttaattcgattccaagtggaccgtaatcccaagtgtttgcaagaccaccgtaaatttcagaaccagggaaaacaaaaccgcgatgtttcgctaagtttacaacttgttccattgaatacataagaaaatcctccttttgaaagttaacgtattggcgatgacatactctgatactttggaaacgggcagtatatgttaaaaagaacataaaaaaacgctcatcccaaggcttatttgcctagggacgagcgtttgcccgcggttccaccctagttgatacacaaaaggtgcatccactttatcatgtattgctcaggactgccgtttccttgcggcttcaggctttcactatccctgaatcgctttttatgcaagtacttataagtccgtcatcgctacttatattaataataatgaacatattctaacacgttcttttttaaatctcaatagaggaacgcgtctatctatgatagagtctcgcctattttttcgttatttattcggtaattttgtttaatatgcttaattgcttcgcgcttacttaatggagcgagctcattgttttgcacgtattcccaaactacatccggatttgtttttgcatattcacgaaggacccagccaattgctttttgaatgaaaaattcttttgaagaatgtagttgtccaataatccagaaaagaagttcttcatccatcttttgtttatatttgagttggaataaaatagtggcacgttgtaaccaaatgttatctgatgcaatccattttgggatataggcagaaatcaattctggatgttgtaaaaagatattacctaaaaatgtaggtacgatgctatcgacagtgtcccaccaagattttgttacaatcaattcttctaagaaggggatatgtgtttcgtttatatgctttttatatttttgcataatatcaagtgcagccgcttggaattcacgttctggtaagtcccaaagttcacgtacgataatttggaagtctcttttatctgggagagtatgtatttgaatgatgtcttttaataattggtgtctttccggtgtttgaatacctagaaatgggaagtgatttttcatataacgagccataggttctgctttttcaagattttgatgagctgtaaaatgctcttgtaatgcttttacaaatggatgcatacgtgtttctcctctcttattctctttcttctcttattatacaaagagtttggataaattttaaaacataacttgcaatgtaatgaaatatgttgaaagtagagaggagaggataagatggaggatcaaggcgtactagcaggtttctttgctcttagttttgcgtttattcttgttatattgatttgggcaattatttcatatttgttaacggcttttgcactttattcgatggcgaaaaatgatggtgcaacggacggggtgcttgcgtttattccgtttttgaatagtaagacgtggggggacttagcgaaagataaattaccagattttttgaaagaagaagcagggtggaaagtattcggcatatatgttgcatgtttcatttttaatttcgtaccaattataagtttactagcaacagctgtatcgattgtattgtccatttatcttatctacgctattttagacagatacggaacgaactctatattatttacgattattcatgtaatcacattttcggtgttcttaccgattcacttatttattattcgaaatgaaccggtgagatataaagagtagatttttcatttttgttgataagtagctataagtaaaaaagcgccctgattatcagagcgctttttctactacataaggtagcgtaaataaatataaatgtgagaaatgattaatgaaacgatcataattgggaaaccgacttttaggaagtccatgtaactaaatttatgtccttcgcggctcgcgatacctgcaacgattacgttagcagaagctccgattaatgttccgtttccgcccagacaagcacctagtgctaatgcccaccataatacatcgatttgtgcgtcagatggtgataagcctagcccaactgccatatcgttaataagtggaatcattgttgcgacgaatgggatgttatcaattgttgcagaggcgataccagatacccataaaataaggatggatgcgtaagaaatatctccgcctgttataccaattactttttgagctaacattttgataagaccgatatcgataagtcctccaacaagtacgaataaccctgcgaagaagaagattgttacccactctacgcttgcaaatacttcttcaatttcatgctctttcacaccaattaacataagtacagtagcaccagttaaggcgataatagcggcatcgatatggaaaatagaatgagtcatgaaacctacaattgtaagtccaagtaccgttaaagattttttcattaatactgggtctttaatgtattgtttttcatctaagctcattaattttttaacttgtacaggatcggcaattaattgtttgcgatacatgaagtaaagtattatcgctgtaactgcaataataataattacaataggtgctagattcaataggaaagcattgaagtctaaatgcttatttgcagaaccaatcataatgttaggtggatcaccaattaatgttgctgttcctccaatgtttgaaaaaataatttcagaaagtaaataaggaacaggatttacttgcagtatgcgcgtaatagataaagtaactggaacaacaagaagtacagttgtaacgttatctaaaaatgcggagccaagcgcggtaagtaaggaaagtgaaattaaaattttaattggatttccttgtgccccttttgctgctttaatggcaacgtattggaagacacctgatttactcgtaatgttcaccaaaatcatcataccgatgagtagcgtaatcgttccccattcaatatgtttcgtaaaggcgttatgtaaatcgacgacccccacaattaccatgagtgctgcaccaagaagtgcgatgacagcgcgattaattttttcagaaataataatggcatatgtaattaaaaagactgcgatagcaaaataatactgccagttagcgagttcttgcgttgtttcgtgcaaaaatctcatctcctttcattcactttttcttagtgtgtcaaaaatgctctagaagaaacacacataacgtcattataaagtaggaaaatggcggatgtaaatgaaaggagagattttgtcatattttctgcataggtcattttttcttattttttaaaatatttgtgggcatttgacatatatataagatacatccaatctgaatatttaaaatggaattagcattcgagcttgttcgtgtaggagtgtcaaatagaaaggaatgacaaaaatgataaggaagggatcgtatggatgaacaacgatttttatttttagactttgagtttacgatgccccagcatagaaagaaaccgaaaggattttttccagagattattgaggtaggactcgtttcagttgctggctgtaaggtagaagatacgtattcatcacatgttaggccgaaaacatttccctctttaacggatcgatgtaagaagtttttaggaataaaacaagaagtcgtggataaagggatttcatttcctgaactcgttaagaagctttcagaatacgaaacgaaatgtaaaccgacaattgtaacgtggggaaatatggatatgaaagtgctgaagcataattgtgaaatggcagggatagcttttccattcttcggacagtgtcgtgatttatctcttgagtataagaagttttttggagaaagaaatcaaacaggattatggaaagcaattgaggcgtatggaaaagtagggacagggaagcatcattgtgcgcttgatgatgcaatgacgacgtacaacatttttaaactagtagaaaaagataaagagtatttagtaaaaccagcacctccaacattaggagaacttgttgatttttcaaaagtgttaaagaaagtgagcacacagtaacgaccaaattgcacattatgtaatttggtcgttttgttttttagagtttgtagtctttctttaactgttctaatgtttctagactacgctctgcaaaaggtgaatcatcttcagaaaatgaattcatttgagtttctaatgctaattttagtgaatctgtataatccggaatttctccttcatatttcttcaccatttgttctggaatgttcgtttgctcacgaaaagctaaagcacgtctttcgtggaaaaatggtacgtcagcttgttttacgttatgtaagtcaccttgcaccggatgttttaaaacagctaatgcttttacgacgtaactgccagggcggctatttgtaacctcaccaatgtattttcctgttttataaataccagtaacgatttcaccaatttcaaatgtttctctcatatttttcacctcaagtttatagtaaggaaagtgagggaaggagtcaaagaaatccttcgttttcagaacgccccttgagaatatggggaggttgcactataatttaaaataatataacagaaaattctgatgttttataaatcctataataaggagtgttctatatgatgcctttatattttccggaagataaaacagaatatattattccggggattgtttgcgttctatttattatcggtgctattgccacgtggcgcatgtttattcgtatatcaaaaagagaagcagaccgattacagaaagttgaagaaaaactattagctgaaaagaaacagtaactcatttttgtatgtttccttctatgctcggacaatctaagggcagaatatattttggagggaataaaatgaaaaaacggctttttttcagttgttgtttactatttctgatggcaggttgtgaccaaggaaagccgaaagaaattgacgtgaaattacataatgcttcaggtgatgaagtggggactgcgaaagtaactcagcaaacaagcggagtgaaaattaagattaaaggggaaggtttcacgccaggcccgcacggcatacatgtgcacgaaattggtgagtgtaaagcaccacgatttgaatcatctgggaatcattttaatcctgataataaaaagcatggactccttaatccgaagggtgcagaaaacggtgatttaccgaacgtagttgcagatggttctggaaagattaaagcagaaatcgatgcacctcacattacacttgaagaagggaaaacgacgattcatagaaaagatggagcgtctattattattacagaaaaccctgatgatggtatgacacaaccgacaggtaaatcaggggatcgaattgcttgtggcgtaattgtaaaaaaagcatcggatatgaagaaaaagtaaaagctaccgtgaatggtagctttctttgtgaaatgtaattgaaaatatatcagcgattattggaatatatcgactgtaactcaaattatatcggcgattattggaatatatcgactgtaacttgaaatatatcgatttaccgacaaaatatgacaaaggagtctgccccaagaatgattcgggacagactcctttcttattatgaaaacgtatgacgcagtctgtttaaaatttcttctaaaacagatcgtggacagccgatgttaattcgaatatgttcttcgccacctaacccgtatttctcaccaggttcaacgatgatttttcctttttcctcaagtagtgcggtacgctcgttttgagaaagctttagacgagaacaatcaatccataataaaaagctaccttctggcttcgttacggaaagagcaggtatgtgagttttaatatattcacaagcaaattgagcattatcttctatatataatcgaatttcgtttagccaatcattacattctgtataggcgctttgcatcgctgtataagcgaagatatttaacccgtggaagccttgtctatactggatggctgtaaaggcatgacggagcttttcgtttggaatgataatgatcgacgcttgtaatccagcgatattaaatgttttacttggagccatgcaagtgatagtgcgctctgctaattcttcagataaggaagcgaacggtgtatgtgtatggtctgcataaatgatatcggaatgaatttcatctgccacaacgattacgtcatatttagtacataacgatccgagctgcacaagttcctctttcgtccaaacgcgtccgattgggttatgagggctacaaagaagcaagagtttgatgccttgctgaaactgcttttctaaatgcttgaagtctatcacatatgtatcattttgtttctgtaatggactcacgcataactgcctgttgtttgttgtgaccatttcgaaaaatggaggataaataggtggttgtacgagaacagattcgttttctttgatgaaagcctgtatgctcgtactaagagctggaacgattccggcgctaaagacaatccattctttttgaatatcccagttgtattgttgttttgtccagttacaaataatatctccaatattttcgggaggaagtgtatagccaaaaatcggatgttcgattcgttgttttaaggcagtttgaattggttttggtacttcaaaatccatatcagcaatccaagcatggataagttcttcgtttttatatgtatcccattttatactatgcgttccacgtcgattgattgctttatgaaatagttgcataagtttgctcccttcttctgtaaaaccaataagttatgaaagttctctctcttcttatagaatagctgatgtgataggataaagaaaagtattaaaaagtgaaaaggcgggaagcgaatgggtacatatgaaaagatgatagaggttgtgaagaattgggatccgtttcaaatgggaccggagttttatgaaacagaagcgagcgatgttgtgagcgtcataagtgtgtttgacgatccaaaatatatcgcaaagaagattcaacatatatactttatgtcttttgaggaagtacctgcgcttgaaaaatgtgagaaattagctgtggaattacttgtaataaaagaaggcggaagctgttcattataggctgtcgggatttccgacagccttttttatattatcccgctatctgctgggtagtaagaccttcacctcaaaatttagcggaagcaaagaagttaggtggaggctgattaaagtttcattttattgcgcggaaaaagcgataatttcttcataaacatgttcaggcttttcttcaggtagtaaatgtcctgtattttcgtaagaaataaattttgaattcggtaaatctttgtgtagacgatgacctacatgtacagggacgacgcggtctttttcaccccaaatgagtaggataggtgtttcgattttttgtaattcagttgaagataagtcaccttcacggtctcgtatcatgcgagttaaagcgggaaatatacggtcgtcataaaaaggagcggagtaaccttttttcatttcatcgtcaattaatgagtgatcatgaacgacattcattaagttatgaacaatgccgcgccttataatccagttctttacgtataaatgaaagaacggtaaataagaagagtatagtaaaggtaaggttgcgcgcgctaaatagctcgagctacatagtaaaatcgtctttgaaatgagttcaggacgtatacggtttacatagagagaaatttgcccacccatagaatgcccaactaatacaatgtttgagagagataaatgttcaattaaatcaataataatcgttgctaaattgtgataagaatacttaaacagatgagacttatcactttttccgaacggtggcaaatcaagagcaatgactgttccttccttcgatagtaaaggaattagacggcggtaactgaatgaggaagataaaaagccgtgaacgagtatgaaagtaggacgttctgttttattatcatgttcatacaattcgtaatgaacagtagtgccgcgagtggaaaaagtgaaataaggacaagtatatttatgattcattttttgtcactccattgatttttgttcatatcatctccaaggaagaagaaaatatgttaacaaaaaaaggcaagatgacgatgtcatcttgcctttcgtttattcagtattacccgcgaacaatattaggcggtgtttttccttgtaaccctgcaactaaattttcagcggcggtcatggccatttgctgacgagtttttaatgttgcagatccgatatgtggtaaagtcacaacattttgtaatgataagagtggattatctttttgaatcggctcttgtgtaaatgtatcgatacctgctgcaaagattttcttttctgttaaagcatggattaacgctttttcatctactgttttgccgcgagaagcattaatgaagattgctgtgtctttcattaatgaaaattccttttctccgataaggtgatatgtttcatctgttaatggagtaagaagaacaataaagtcagactgattcagtagcgtctgtaaatcacaatatgtagcatcgaatttttgttcagcttcttctttacgacggcggttatagtaaagaacattcatatcaaatccgaattttgctcgttttgcaacggcttctccaattcggcccataccgataataccaattgtgctatggtgtacatctagtccgaagtgttcttttccgatttcagcgttccattcaccatttttcacgtaagaatcgagttcgcaaacgcggcgcccagctgatagcataagggcgaaaacgagatcagctactgtatcatctaatacgtatggtgtatttgttccgataacatttcggtttttcatcgcttgtaaatcaaaattatcgtaaccgacagaaatgttgctcactacttttaagttaggagctactgtcagtaattcttcattaatagcagatccgaaatttaataacccatctttatcttgtattttctctaatagaatatcacgaggtactttctcattttgatcccatttttcataatcacagtgttctgataaatagttttctacaaatgttggaactggttcagcaatataaacttttggtttcacggttccatcccctttcgctttatcccgcatttttccgctgattaaagtttcactttattttgacataattcaatagaaaaatcttcttttcaaacttgaaagggtatttgtataatttagacacaaacgaaaaggaaggatgatttatatggtgacagaaaaagaattagaattattagcttgtcttgaaaagagtagtcgattatctgtagatacattagcgaagctgttaaatatagaagtagaagaagtaaagaagatggttgcgagattagaaaatgaaaagattattgtggattatgtaacacatatcgattggacgaaagtgaaagaacatacaggtttaacggcaatgatcgatgtgaaagttacgccaaagcatggcgttggatttgatgcggttgctgagcaaatttatcgttattcagaagtgaaatccgtttatttaatgtcagggacatatgatctttctattacattagaagggaaaacgatgggggaagtagcgatgtttgtttctgagaaattagcaacaattgaatctgtcgtttctacaactactcatttcattttgaagaagtataaacatgagggtgttatttatgaaaaagacgatgatgataagcgaattgtggtgacaccatgaagcaatttgaactatctagatcagcagaatctttaaaaccatctggtattcgaaaattttttgatttagcagcaaatatgaaaggtgttatctccctcggggtaggagagccagattttgttaccccttggaatgtaaggcaagcatgtattcgttctttggaacaagggtatacgtcatatacagcaaatgcaggattattagagctccgtcaagaaatagcaaagtatctaaaaaaacaatttgcagtatcttatgacccaagtgatgaaatcattgttacagttggagcgagccaggcgttagatgtagcgatgcgcgccattataaatcctgatgatgaagtgctcattattgaaccaagcttcgtttcttatgcaccacttgtgacattagctggaggagttccggttcctgtggcgactactttagaaaacgagtttaaagtactaccagaacagattgaagcagttattacagcgaaaacaaaggcgattttgctttgttcaccaaataacccgacaggtgcaatgctaaataaatccgagcttgaagaaatagcagtgattgttgagaagtacaatctaattgtattatctgatgaaatttatgcagagcttgtatacgacgaagtatatacaagtttcgcgagtattaaaaatatgcgtgagcatacgattttaatttcgggattttcaaaagggtttgcgatgacaggatggcgtctcggtatgattgcagctcctgttcaattttcagaattaatgctcaaaatccatcagtattcaatgatgtgtgcaccgacgatgtctcagtttgcagcacttgaggcgttacgcgcagggaacgatgaagtgattcgaatgagagatagttataagaagcgtcgtaacttcatgacgaaatctttcaatgaaatgggcttaacgtgtcatgtgccaggcggagcattttatgttttcccttctatatcttcaacaggattatcttcagcggaatttgcagaacagttattgctggaagaaaaagtggctgttgtccctggtaccgtatttggcgaaagtggtgaaggttttattcgttgttcttatgcaacatcgcttgaacaacttatggaagcaatgaagagaatggaacggtttgtagagaataaaaaaaggacaaaacgtaatacgttttgtccataaaagggggggaatactagaaagccatgtgttagtagtctatcccaatattggataattatacttctttaagggaaatttttcatgaattttgaatgagttctgtcatagtggtataatttactaatataaggtatacgcattctagataacgttatctagaatgcgtactaaccaatcggatatttaaaataaatatatctgctttgctctctataattgtagagagaatggtaaacgtatgggagtgtttcatatgtcagaacaatatacaacaggagtggttgtaacagggaaagtgactggaattcaagattacggtgcgtttgtagcgttagatgcagaaacacaagggcttgtgcatatatctgaaattacaaatggatatgtaaaggatattcatgactttttaaaggtcggcgatacagtagaagtaaaggtactttcaattgatgaagagcacagaaaaatgagtttatcgttaaaagcggcgaaaagaaaacaaggaaggattcttataccgaacccatctgaaaacggatttaatacgctgcgagaaaagttggcagaatggattgaagagtccgagttaacaaagtaaaagaggaacgcatatgagcgttcctcttttactttatcttatgatatatatttgcaaatatgattgcatgcaatcatattcgtatgtcggaggtgaaaggacatactgattatcgaatttcgtttgtttctgggtgcgtaccaagattttcagatggtttaaacagtaaaccaaggttgataagcccagatataccaacgatgccgtaaataatacgtgcaagagctgaattttgtccaccgaaaatggctgctactaagtcaaactggaaaaacccgattagtccccagttcacagcgccaattacagtaaagactaatgcgatacgttgtaaagtactcatgaaaaagccccccttaattgtgaagcatgagcaagcgatgagttaattaactcttttatagaatggggtagttatgttgtttttatacataaaaaatgtttgaaagaagatgtatatacatctataccgaaaaatgcgaatttttatgcaaaaaatgaactttttctaaaaaatatatattggttacgtttacaatgtttgaatcgcttgatttacaacttcagtttcgctaaagtgaatacagaaatacatatccataattggagggaaaaagatgagtacacatgtaacgttcgactattctaaagcgttatccttcatcggtgaacatgaaatcacttatttacgtgatgcagtgaaagtaacacatcacgcaatccacgaaaaaactggagctgggaacgatttccttgggtgggtagaccttccgcttcaatatgacaaagaagaatttgctcgcattcaaaaatgcgcagaaaaaattaaaaatgactctgacattttacttgttgtaggtatcggtggttcttacttaggagcacgtgcagcaatcgaaatgttaaaccattctttctacaacacgctttctaaagaacaacgtaaaactccacaagtgctatttgttggacaaaacattagctccacttacatgaaagatttaatggacgtattagaaggtaaagacttctctattaacgttatttccaaatcaggtacaacaacagagccagcactagcattccgtatcttccgtaagttattagaagaaaagtatggaaaagaagaagctcgcaaacgtatttatgcaactacagataaagcgcgtggtgcattaaaaacattagctgataacgaaggttacgaaacatttgttattccagatgatgttggaggtcgtttctctgtattaacgccagttggtttattaccaatcgcagtaagtggcttaaatattgaagagatgatgaaaggtgcagctgctggtcgtgatgacttcggaacatcagaactagaagaaaatccagcttaccaatatgcagtagttcgtaacgctttatacaataaaggaaaaacaattgaaatgcttgttaactatgaaccagcacttcaatacttcgctgagtggtggaaacagttatttggtgaaagtgaaggaaaagatcaaaaaggtattttcccatcttcagcaaacttctcaactgatttacactcattaggtcaatacgttcaagaaggtcgtcgtgacttatttgaaacagtccttaaagtaggcaaatctacacatgaactaacaatcgaatcagaagaaaacgatttagacggattaaactaccttgctggtgaaactgtagacttcgtaaacacaaaagcatacgaaggtacattacttgcacatagcgacgggggagtaccaaacttaatcgtcaatattcctgaattaaatgagtacacattcggttaccttgtatacttcttcgaaaaagcatgtgcgatgagcggctacttattaggcgtgaatccatttgaccaacctggagtagaagcatataagaaaaacatgtttgctttacttggtaaaccaggatttgaagaattaaaagcagaattagaagagcgtttaaaataataaaaagcgaccggattccggtcgctttttattattttatcgaaaagtccatcagtatattcaaactaaagtgggtatgctaaaggaaaagtctaggagggatgggcttgattccgattcaatcaaatttagaaggacgtacatatgcgttatataaattagaagagattatgaaaccacttggatatagcattggtggtaattgggattatgataaaggatgcttcgattacaaaatcgatgaagaagatgggtatcaatttttacgagtgccatttacagccattgatggagaactagatgtaccaggcgtaatagttcgtcttggaacgccgtatattctttcgcacgtatatcaagacgaactagatgataatgtgaatactttaacagctggaacaagtggaatggatcaatttgctgagccgaaagatccagatggagatgtgaaaagaaaatatatcaatattgggaaagtgctcatgcaagaattagagcgtcattttactaatggtgaataacaatgagtatgtcgctttcaatgagaacaaaggaatgaactggattaatcatatattgttcgtcgcgctttatacctagtaagagaatgttttgctttaaaagagtatagctacaattggcaaaagtttgtccggtgcaggacgatggaagcttcatcagttgtaatttattatcagagatttcgtcgtaaagtgaaaatagtacacctgaaatggaagggaataaaagagaagcggtaaatacatagctcgttaatttatttccttctataatttctgacgcgccagctctcgttgcattttgtatttgttcagaagtaagaagttcagcgatgcagtgaatgtttgggttgagcccttttgcagttaaaatatttaaaatggactgtgtatccgctaagctttcatttttttctttatccgctgttattaatatggtgtgtgccgttgcaatattagcctttaataaagtttgatcgtgatgcggacaaccttttataaattctaaatgatgaaatggttttggaagtaaagaaagtgtttcatcaattaaaacgatatcaaggtttggttgtaatacgtgcatttgctttacaacatgttttgcgcgctcattccagccaacgataatcatatgaccgttagaagtagcggcttcttcacctttaattttcatatattgtttactaatcatctcggtagcaaacagcaccatataataagaacaaaagccagttcctaataaaataatacttatacctattagttttcctatcgtcgtatggggagcaaagtcgccatatccaactgtaaaaatggtaacgattgaccaccaaattccgtcaaaccatgtagtgaaatgaaaaggttctaatctatgtataagaaaaccggaaaaagcagtcagtacaataataaaacaaattaaacgaaaaataatggaatcacgaaatgtatctactaaattcggacgggatttcaattgcctattcctccttactttgtaggactacattcattgttgccattatagaaaaaagaaaaactctctaattaaagagagtttgttttacgttacatactttccacttcagtttgttggacactttcaagatgctggagagcatagtaaacatcagcggtatgtcttttttgatcaatggacagtttaagatgtaaatagtgagaaccgttttctaatgttttaagcttcatattcttaacttttatatccatttcttttatttcttcaattacgattgggatattgtccatatttcgtacaacaagtttcacagcgatatcacgttgacgaaatgatctagggcctacatatttcattgcgagtggtataagttcgacactaatcataaggaaacacattccgaatatcgcttcaatatagaatccggccccaacagcaataccaataccagaagcaccccagatcatagcggcagtcgtgagccctgcaatgctatcgttgcctcttcttaaaattacgccagcacctaaaaaaccaattcctgatacaatttgagcggcaagtcgaagtggatccatattcatatgatcggtatgtggtaagttataagctgctttaatagaaacaatcgttaggaggcaactaataatagaaataactaaacacgtttttaaaccaagtggtttccgttttaattcgcgttctaaaccaatggcaaatcctaaaatagccgagagacctagtttgattaataaatcggtatagtccatatatattcctccttgtatgatatgctatatgaataaaacgcttattatagaaagaaacgtcttttgatagagtaactttatataaaatatatgtaggaattgctcatacatgaaagagatatttcgtttaagtatatgatataaaaaaagaaatgtgggcagttttaaaaaaagtttataaaaggtgttgcatttcatttttcaccatgatatattaataaccgtcgctgatgcggaaacgcagaaaacgacaaaaaagaaattgaaaaacttagttgacatcgaaaaacgaagatgttaacataaggaagtcgcaaatgagcgaccaagtagttctttgaaaactgaacgaaacaaacaacgtgaaacgtcaatttttattttagatgctagacaaactaaaaagctaaagaagaagaaaaagcaagagaaatagcaaaagctaaagaagaagagaaggcaagagaaatagcaaaagctaaagaagaagagaaggcaagagaaatagcaaaagctaaagaagaagagaaggcaagagaaatagcaaaagctaaagaagaagaaaaagcaagagaaatagcaaaagctaaagaagaagagagagcgaaagaagcatctaaaaacaacatacagtctgctaaacgtgaattaacggtagtagcgacagcgtatactgctgatccaagtgaaaatggtacatatggtggacgcgttttaactgcgatggggcatgatttaacggcaaatccgaatatgagaattatcgcagttgacccgaaaataatcccattaggatctaaagtatgggtagaaggttatggagaagctatcgctggtgatactggaagtgcaattaaaggtaatcgtattgatgttttaatgggttcaaaaagtaaagctatgaattggggaagacaaactgttaaagtgaaaattttatagtaacaataattatccaaatagaagtcagttctctttattgaggctggcttttatttttttagtagaaggataataggatttttaaatggcttattactaaacctgtaacaaaacataaaaattaattctctgttttgatttaaaagatgggagacttgctgaacttaaaagtaatgaactaaatattttaccattcgtttcatgcttgaactgcgcgatggtgtgggaaccgcaatattttcagttaagtgatggaggtaaaacagttcaaatcatacagcagcaaaatatagaagaatggataatggaagaggaatataagttaccagtttcattaccaaaaacaacggtaaagcttataaatatgaaaaatgaagatatacctatagatgaagatagttactgggaagcttttgacttgttcggttctgaatatgtatgtagattattaggggtaccgttatatgatgatcttccaaaggatttggcgtgtccaacttgtgcgaaagagatgaaatatgttgctacaattactcaagatattgaggaacgtggacttatttcagtagttaatttccagtttggggaaatgaatatatactattatttatgtatagattgtttaattataaaaactgaaatacaaaatacataacaagcctaacatattatgttaggcttgttttttgatcgcaacatcattaagaattgcatcaaatatatctttttgcgtaaagttatctgtaaaaatagtttctctggcaaccttaatagtatcgtgcggattataccatttttgtagggaatcttcaccaaattcgtgtcgtttgtcccttttgttatgtcgtctaatagtttcctctaatgataaatcaaagtaatatgcaaatgcattttcatcaaaataacgaattaattcttttaacatctcaccatacctatgactgttcaatataccttctaaaataacaaattcacattttccttttccgtacttcgtaatttcaaatagtaaatcatgtgataaattacccattgtgtcgtgtactctaagcatatctctacgtacaatatcctgtgatactaaaagtgtcccttgtccgaaatgttcttgtagttgttttgcaatcgttgttttaccacttgcggagtttcctctaagaatgattaaagtggatgtaaatataggattagacataatgtattccccccaaacagcattaattatatagaaaattttaacaaataaagtgaggaaagtgtataatcaatatgatggatatttaaggagggggtaagatgggggatatattaaaaaatgcacaacctatatggaaacggacttggtttcgttatctaggggcattttttattgttcagttactgtttattttgtgtgaaataactgggtgggtaccaaactttaggccaggcggagagttttttaatagaatattaaattctcaatttttcactgaatggttcacactctatacaatcccgcaatttaacgtatttacagcattttttgcgattacattactaccatatgcattagtaggtgcaatgaaagatgtaacagcaagaaaaaatataaaggaataatagaggtataatatgctttttcaaaaagaaggtttattgattagatacgtaatggaagatgatgcatctatcatttctaaatggttaacggacccagaagtcctgcggtattacgaaggacgagataatccgcaatctgtagaaaaggtgcttgatcattttatacatagtccaaacagtaatgaaaaaagatgtttaatagaatttgataccattccgattggttacatacaaatgtatccagtggattcagagtggaaagcgttatatggctataaagaatcacaaaatgtatgggggatggaccaatttatcggtgaaccagcctattggggaaagggaattggaacaaaactcgttcaggcagcaattacatatattatgggtgaaatgggagcagaagcaattgcaatggatccgaaagtaaataatgaacgggcaataaagtgttatgaaaaaagtggatttaaaaaagtaaagattttaaaggaacatgagttgcatgaggggaaattagaagattgttggatgatggaatataaacaataataatggcttatacaaacaaagggggatgtgtgaaatgaaaaaagcattaatcgtaattgatgtgcaagcgggtatgtatacagctggaatgccagtacataatgggggaaagtttttacaaacactgcaagagcttattagggaatgtcgttcaaatgatattccagttatttatatccaacataacggtcctaaagaccatccgttagaaaaaggtacggatggatggcgaatccatgcggccatcgctccgcaagaaggagataatatagttgaaaagacgactccagattcattccataatacaaacttaagcgaagtgttacaagagaaaggaattgaacacgttattctttcgggaatgcaaacagagtattgtgtagatacgacaacgcgcagagcatgtagtgaaggatataaagtaacgttagtgagtgatgcacatagtacatttaatacagaagtgttacgtgctgaagatattgtgaaacatcataacgcagtattgggagcgtttgcggatgttgttgaagtaaaagacttaaaagtggctgcctctaaataagaggcagttttcattagaaaaaatagcgtcaaatattgttagtaggtcggtattttgaaataatcacttatataatttcacgtaccataatgaaaaaatacaaaaaaggagcaccacataattaaaaagggcgctcctgcattaaaacgttacttttttttatctttatccaatatattttgttcttcagcaaactctgtaccatatgcaaagcggcgattaatacgaatgttatcattgttgtgccttgtatgagagttagagaagcgatgaacgattacttcagataaagtgaagacgatggcagaaaggatactgccccatgcaatttgcatatagttgtctaataaaatattaccgaaaatccatacgcttaaatatgttaataagaaatccgacataatggcaccagtattgccaattcgatttaaaatgattttatcaacgaacatgtaggatacgattgtaacaaagagactgaatgaaataatttgaacaaacgttgcagggaaaaataaagcaagcccaatgctaaatgcgataatgcacgatataaacttgataagcactactgtgaaatcattcaaaatttacacctccgatttatacatagtttttcaataaattctggagttcatacattgtaacggatttatttacataaaactttttcatgttcggaatttagtctaaatattataaaaacaatgaaaaaatgttatagtaaaatgagagtgtatgacatttttaggtaagggggaatccaggatgtggattacttcagaagtagaaattccagatgagttaattgatcaccttgagcaaggaaagttagtattatttgttggagcgggagtttctatgaaagggaaatcaaacttaccgaattttgatgatttagttgatgaaattgcaaaaacgttatatgtcgaaaaacgtgaaataacagaaccacatgattattatcttggtaaaattgcgaaaacaaaagatgtacatcaagtcgcaagagatcttgttcatatagagaaatcaaaaccgaatccattgcattatgcaattccaaggctatttcctttagatacagatatccgcattgtaacaacaaattttgatcaacattttacaacagcaattaaagaaataaatagagatatcaatgtttattacgctccagctttaccgactgggagagcttttaaaggtcttgcttatatacatggtaatgtagaacaggagaaagaggctttaattttaacagatggtgattttggaagggcttacttaacggaagggtgggcgagaagatttttagttgatctattctcaaattacaccgttttattcattggatatagtcataatgacccagtaatgaaatatttagcaactggtttaccaccaagtacaagacgatttgcttttgtcgcacaaggagaaaatacgtaccactgggaacatttagggataagaccaattgtgtatccgaataaggtgaataatcatcaatccctcgtaaaagcagtaaaacgctgggctgaattaatgggtgataattatattacgaaaagaatgcgtattcgggatattgtaacggttcccccgtcagtagaacaggaacaattatcatacataaagcaatcgattaaaaaaattgaaacagtacgttactttgtggaatttgctcatgattatgaatgggtcgaatggttagaagcagaaggtaaattacaaaatttgtttatgcttacgctaaactataatgaagtagatgaattacttgcagaatggttagtggaacaatttctttttagtcatcagaaagaattatttcaattaatttataaaaactattctaaaatatcaccgttattatggagaacaatttgtaactacttaaacgaaacgaagagtaagatggacccgctgttgtttgcaaggtggacactccttttattagaaacagctgaaaaagatagtagctctatagaaaagatttctaagttactgcaaaaatgttcttttcctgagcataaagaaattgccttattgttactaacttttattttagacggaaaactgaagttgaaacgtgtaagaaaatgggggaatgatacgcaagaatcaatagaactcgaggaatcgagtcgcttaccagtatctacattttctcatgtggagcaaatttggaacgaaaagatgaggccatatatcgcttattatgctgttccaattatgatgattggattagaaaaattgagaatgttgtcgttaagacaaacggcactgaaaaaaagaaataaggaaaatgtagagaaagagtttcatcaaaatgatcttgcatttttaatacgaattgtaaaagagtgtctaacttatttatgcgaaaacaatgaaaaaaaagcggattattatattacagaaatgatagaagcaaatagtgtacttaaaaagcgaattgcaattgatgcgatgaataaaaatatttttgttcgtgtagatgacaaaatgaaatggttgttacatgaaggacttcttttagatttcacttataaacacgaagtttttcaacttttaaaaaggcattatgcatattgtttagaaaaaacaaaagaagaagtcactcgaactgtaataaagcatcttacagaagagagggtatttgatgcatgtctcgtattagacttattattcaagtgtgattcgaatagcccatctacggcaaatgggtatgagttaatgaagcaaaagcatcctcattttcattctgaacgatacagtgtacaaaagaaagaagatacagcagaaagcattacttgtaatgtaactgctgacggattattgcagctgaaagatgttgaaattatgaagcaagttcagcaattttcgcaagatggtgtttttgaacaacgccattttttagagatgttatcaaaagcatgtaaattaaacacagagtggagtatttcatttgcataccaattagtaggagtgcaagaaataagtaatgaagtatggtttgtttgtattagagaatggcgaaataatcgaggattgacgaatgagcaaatccaaaaaattattccgctattgcagaaatttgttagaaatactgcttttcattggttaattagtagttttctatatgaaattagtaatcgactagaagagttagaagagaatagtatacgtgttgtaaaacgatttgctttttcagtgttccctcaagttatgaagagtgatgcagactttaagcttgggaaacaagatttttataatgaatcaattcagcatccagttggaaaaatgacggctgtattattaaagttgttatcatatgatcatttatacgatcgtaatgtatatgaatatttatttttatttgaagaacaagtaagagttaattcggaacgaacaaactttatgtttgctcgtttaatagcagatattacatttctatatcatattgaaaaacaatggtgccgaaaatatttgttaccatacttagatttaaaaaaacaaaatgagattacggaatatgcatgggccggcttatgttacacgcaaataaatttacctttatttacagaaatgaagcgatttattaagtatgcgatagaacatttggaagtattacatccgcatacgagagaagctttcttgaagtggcttagctttgtatttattaaatgtgtactatattgggagcaaaaaacaaattggttatacccgttactcatactagaaaatgaagaaaataaaattaagtttatgcagtttttatgctattacgtcaaaacattaagtgtaaaagaacaacaaaagttttggacagcttggctcagtgtatttttgcgagaacgaccaaaaatgggtgagataactgcgagagaatatgtgatgcttttacgtattattttatacatggatgaaatattagaaaaaggattatgtattatgtctcgtgcattttcaagtgtacaaggtaaatgtacaggtgaggaaatgaagcggttattgattgaaatgcttcataaaaaagaaagtatgaaagcgcataaagaaatgtttgcaaatgtgttttttattttactacaaacatgtcacgaagccgttttatttgaaaaagaaatcatacaaataaaagaattattagttcagtatgaagtagaggaatatgttttacatttactagaaaatgaaataattcgcataggaattgtaatgggtgatttacaaaaagaattatagaacgaaagtggaatttaaaaaaatatataaaaagttgttgacagtgttttgaaaagcgttctataatacgaatcatacttattcaatttcaaaaacatttgaataaacaaagtgcaatgaagagatcacagtagtggttagtcttactgtaacagagagctggtggttggtgtgaaccagtacagggataatcatgaattacagtcttggagcatctttttcgtaataaagatagtttgtctttatgaggaaaaagcggtcaattgatcgttaacagtgaagagaggtagacggaaagttagtctacaactagggtggtaccgcgataaatatcgtccctactgatttattcagtagggactttttgtattttagtggttcaacttgaaaattaaatagtcatgcattgaaaggaaaagcagtagttgttgtttccctgtaacagagagctggtggttggtgcaaaccagtacataaacaagagcgaattacagtcctggagcatctttttcgtagtaaagatagtattgtctttatgaagggaaagacggtcagatgatcgttaacaatgaagagaggtagacgaaagaagtctacaactagggtggtaccgcgataaatatcgtccctactgattgaatcagtagggcttttttgtacaaaaaagtgggtttttaactagtagttcatgtctttgtacgaattattagtttaaaataagaagaggtatcgattccactataaatttgtataattagtcagttcagaaaatagagaattttttattctcttactatacttttaaaacattagaggaggatttccaaatggcaaatcatgaattagatcaattacgtaaacaggtagatgaaattaacttacaactattacaccttttaaacaaacgtggtgaaattgttcaaaaaattggagagcaaaagcaagtacaaggcacgaaacgctttgatccagtacgtgagcgtgaagtacttgatatgattgcagagcataacgaaggaccattcgaaacatcaacagttcaacatattttcaaaacgattttcaaagcaagcttagagttacaagaagatgataaccgtaaagcgttactagtatcacgtaaaaagaaacaagaaaatacaattgttgatgtaaaaggtgaattgattggaaacggaacacaaacgttcatcatgggaccttgtgcagtagaaagtttagaacaagttcgtcaagtagggcaagcgatgaaagaccaaggcttaaaattaatgcgcggtggtgcattcaaaccgagaacttctccatatgatttccaaggtttaggagtagaaggacttcaaattttacgtcaagtagcagacgagtttgacttagcaattattagtgaaattttaaatccgaacgatgttgaaatggcattagactacgttgatgtaattcaagttggcgcacgtaacatgcaaaacttcgatttattacgagctgtaggtaaagttaacacaccagtattattaaaacgtggattagcagcaacaattgatgagttcattaacgcagcggaatacatcattgcgcaaggtaacgatcaaattattctttgtgagcgcggtatccgcacatacgaaagagcaacacgtaacacattagacatttctgcagtaccaattttaaagaaagaaacacatttaccagttatcgttgatgtaacacattcaactggacgcagagatttattattaccaacagcgaaagcggcacttgcaattggcgcagatgcagtaatggctgaagttcatccagatccagcagttgcattatcagattctgcacaacaaatggacattccagaattccatagattcatggatgagttaaaaggtttcaaaaataaattatcttaattccatatcatatatgcattgaagaggaaacagtagtgcttatctcactgttaaagagagctgatggtcggtgtgaatcagtacaaaggtaagcatgaattacagccttggagcatctttcccgacaacttttggagggtaagacggtcgaacgatcgttaaagaagaagagaggtagacgaaagaagtctacaactagggtggtaccgcgataaacatcgtccctactgagcgctcagtagggacttttttgtacaaaaaaatagtaaaggggcaagagaaatgagatacattacagctggagaatcacatggaccgcagttaacagttattttagaaggtgtaccagcaggtttgacacttacggcggaacatattaataaagaattattaagaagacaaaaaggtcatggacgcggaagacgtatgcaaattgaaacagatacagttgaaattgtaagtggtgttcgtcacgggatgacacttggatcaccgattacgttaattgtaaaaaatgatgatttcaaacattggacgaaagtaatgggtgcagagccaatttcggaaaaagaaagtaaagacatgaaacgtacaattacaaaaccacgtcccggacatgcagatttaaatggagcaattaaatatggtcatcgtgatataagaaacgtattagagcggtcatctgcaagagaaacgacagttcgtgtagctgctggtgcagttgcaaaacaaattttaagcgaattaggcgtgggaattgcaggacatgttcttgaaattggtggagtaaaagcaaaacatatttcaaacttatcaattgaagaaattcaaacaattactgaaaactcaccagttcgatgtttagataaagaagtagagcaagaaatgatgaatgcgattgacaacgcaaaaagtagtggagattcaatcggtggtattgtggaagtcattgcagaaggtatgccgattggcgttggtagttacgttcattacgatcgtaaattagatgcaaaacttgctggtgcaattatgagtataaatgcatttaaaggtgctgaaatcggcgtaggttttgaagcggcacgacaaccaggaagcaaagtgcatgatgaaattctgtgggatgaaaaaaaaggatacacgagaaaaacgaataatgccggcgggttagaaggcggtatgacaacaggtatgccaattatcgtaagaggcgtgatgaagccaattcctactttatacaaaccgttagcaagcgttgatattgatacgaaagaagcattccaagcgagtattgaaagatctgatagttgcgcagtaccagcagcgggtgtagtagctgaatctgttgtggcatgggaacttgcagatgcactagtcgaacaattcggaaaagatcgtatggaattattaaaacaaaacattatgcaacacaataactacgcaaaagaattttaataaaaaggtgggtttaacgtgcaagtaaaagatcaactatcatcattacaaccatataaaccaggtaaatcaccagaacaaatgaaagaagtgtacggagatcattcgtttgtgaaattagcatcgaatgaaaatccatttggttgttcaccgagagttttagaagagttgcaaaactcttggttggaacatgctttatatcctgacggaggtgctacaacgctccgtcaaacaatcgcagataagttgcatgtgcaaatggaacaagtactttgtggtagtggtttagatgaaatcattcaaataataagccgcgccgtattacgagcgggagataacattgtaacagcaggtgcaacattcccgcagtaccgccatcatgcgattattgaagggtgtgaagtgaaagaaattcctttaaataaaggtgtatacgatttagacgaaatttcgtcagcggtaaataataatacgaaaatcgtatggatttgtaatccaaacaacccgacgggcacatatgtgaatgagcaaaaattaactcgatttattgaaggcattagtgaaaatacgttaattgtcattgatgaagcgtactatgaatacgtaacagcaaaagatttccctgagacattaccgcttttagaaaaacataaaaacattcttgtacttagaacgttttctaaagcatacggattagcttctttccgcgttggatatgcgatcggacaggaagagctaattgagaaattaaatgtcgtacgtttaccatttaacgtatcttcattagcgcaaaaagcagcgacgattgcttttggtgatgacgagtttattaaagaaatagttcacatgaatacagaaggattacagcaatacgagagtttctgtaaggaaaacggtataccattttattcgtcacaaactaatttcatcttcttaccggtagataatgctggagagatttatgaagcttgtgcacatgcaggatttattattcgtccgttcccgaatggtgtccgtattacagttggaacaagggagcaaaatgaaggggtgatttcagtgttaaaacaacactttgaaaataaaaaaaataagtctcgagatgaggcaaatgcgtaaaaaggtagtattaattggaacaggtttaataggaggctctctcgcattagcaattaagaaagagcacgatgtaacgataacagggtacgatatatttaaagagcaagtagagcgtgcaaaagaattacacgtagtagatgaaataggagttgatttacagcgtgcatgtgaagaggcacatttaattgtttttgcttctccagttgaagaaacgaagaagctattacacaaacttgcgtcattccgtttacgagaagatgttatagtgactgatgttggtagtacaaaagggtctattatgaacgaagcggaagctttattttcaaaggatgtttctttcattggtggacatccgatggcgggttctcataaaacgggagttgaaagtgcaaaggcacatttatttgaaaatgcattttacattttaacaccgatgaatcacgtgccaaataaacaagtggaagaccttaaagtatggttaaaaggaacagggtcacattttcttgttttaaatacggaagaacatgattatgtaacagggatcgttagtcattttccgcaccttatcgcagcaggtttagtaaagcaagttgagaaacatgcaggagataatccgctcattcatcaactagctgctggaggtttcaaagacattacacgtatcgcatctagtagtccaaaaatgtggagtgatattgtaaagcaaaatcgagagcatttaatggtattattaaaagagtggatctctgaaatggaagatttatataaaacagtttctaccggagatgcaggcgagattcaaaactattttgcagatgcgaaagaataccgtgattctttaccagtaagaaagagaggggcaattcctgcctatcacgacttatacgtcgatgtattagataaggtgggggcattggctcatattacgagtattttagcgcgcgaggaaattagtattacgaacttgcaaatattagaagcgcgtgaaggactgcttggggtattacgtattagcttccaaagggaagaagatcgtatgaaagcaaagctagcgcttggagaagaagaataccaaacttatgaaacaatttaaatgagaaggtgaaaaacgtgaaagaaagaacaatacaacctgttaataacggattgaatggcaatattacaatcccaggtgataaatccatttcacaccgtgctgttatgttcggttctattgcagaagggaaaacaataattagaggtttcttgcccggtgcagactgtttaagtacgatttcatgttttaaagaaatgggagtagaaattacgcaaaacggtgatgaggttactgtagttggtaaaggattagaaggtttacaagaaccgaaagctgtattagatgttggtaattctggtacaacaatccgattaatgtcaggtatattagctaacacaccatttttctcttgcgtacaaggtgatgaatctatcgcaaaaagaccgatgaagcgtgtaacaaacccattaaaacaaatgggcgcaaacatagacggccgagaagaaggaacatttacaccgttaacaatacgtggcggcgatttaaaagcaattgaatatatttctcctgttgcaagtgcacaagtaaagtcggctattttacttgcaggtcttcgtgcagaaggtgtaacagctgttacagaaccacatatttcacgcgaccatacggaaagaatgctcgaagcatttggtgttaaagtaactcgcgaagggaaaacagtgaagctgtcaggtggacaaaaattaacagcaacagacattcaagtgccaggtgacgtatcatcagcagcgtttttcttagtagcaggtgcaatcatcccaaatagtaaactagtattacaaaatgtaggaatgaatccaacccgtacaggtattattgatgttttagaaaaaatgggtgctacgttcactgtagatctaattaacgaagaggcatcagaaccagctgcaaatattacaatcgaaacatcttcattaaaaggaattgaaattggcggagatattatccctagattaatcgatgagattcctgtaatcgcattagcggcaacgcaagcagaaggaattacagtaattaaagatgcacacgaattaaaagtaaaagaaacaaaccgtattgatacagtcgttgctgagttaacgaaactaggagctcgcatagaagcaactgatgacggtatgatcatttacggaaaatcagctctaaaaggcaatacagtaaatagttatggtgatcaccgtatcggaatgatgcttgcaattgctggctgtttggcagaaggaaaaacaattattgaagatgcagaagcagtaggtgtatcatatcctacattctttgacgaacttcaaaagttagctaaataaaaagggtggaaagcagatacgtgatgtatctgctttttttgttaaaacgtccttgtaatttcacttatcgaactataatagtaagaattatgatacaattcaaacagagaatggaggagaattatatgaatgtcatacaattaaaagaagataagtttagagaagcattacgtttatcagaatacgcttttcaatataaagtagatgaggaacgattacagcagcaacttacaaaaatgaaggaaagtcatgaaatatacggcattatggaaggggaagacttagctgcaaaactacacctcatcccgtttcatatttacataggtaaagaaaaatttaaaatgggtggcgttgcaggagtagcgacgtatccagagtacagaagaagtgggtatgtaaaagagctacttcaacattcacttcaaacaatgaaaaaagatggctttacagtctctatgttacatccatttgctgtttcgttttaccgtaaatacggctgggaactttgtgcgaatctactcaaatgtcatataagtaagagcgatttagtgatgaaaaaacaagtaaatggtactgtgaaacgttttaataaagaaaatcatccagaagaagtcgagaagctctatgaagcatttgcagaacgtttttcatgtatgttagttcgagagaagaactggtggttacaagcggtttatgatgatttaacattagcgatttactatgatgaaaataaaaaagcagcaggttacatgttatacaaaatagaaaactataaaatgacagtagaagaatttgtaccactgcataatgaagcacgaaatggtctgtggaactttatttgtcagcatgattctatgattaaagaaattgaaatgacagtaagtgaaagcgaaccgttattatattcattgcaagagccacgcgtgaagacagaaataaaaccatattttatgggaagaattgtagatgtagagcagttcttaaaacaatatgagttgaattggaacaatgtagagcaagaagtgatcctaaacattacagacgcatttgctccgtggaataacataacagtgagacttgcaaatcatgaaataacaataataaaagaaaaaacaatagataaaggcatcaaactggatataaacgagttatctacaataatgttcggctataaacgtccgttacaactgaatgaattagaattaattagcggaagtgaagaggaaatacaagcgtttgagaaaatagttccggtacgagaagcatttatttatgatttcttttaagttttcaatagaaaattgggctgcccaaaaacaatttttgggacagctttctctttggttgtcggtaagtcgatatatcctgaaaatcgctgatataattggagatgcgccgatatattctgaaaatcgctgatataattagacttgcgctgatatattctaataatcgttgatataattttttcactaaaacgtaactatactttgtcacgcacttgacttttaatccatgtaatttataattaaaaacggaatgaattttcattcctggaaatagaggtggaaaaaatggctaaaaacaaacaagaggatatttttgatgctgcgatgcaactttttgcagagcgtggttacgatggtacgacaattccaatgatcgctgaaaaggcaaaagtcggtgcgggtactatttatcgctattttgaaaataaagaggcacttgttaactcattattttcaaaaagtatgttacagctttctgaaataataaaaacggattttcctgttgaagcaaatattcgtgaacagtttagtcatacgtacaaccgtttatttgaatttgcgagaaacaatgtagatgcttttttatttacaaattctcactgtgatagttattttcttgatgaacagagtaagaaaatatttgatgattttataggcttctttatgaatattattgaagatggaatcgcaaaaggttttcttcgtccattgcctccagttgctttaattattattgtatatcaaccgctagaaaaattaacgaaagtaattgcaacagggcaattagaatactcgaaagagttagtaaaagaattagaagaaagctcttggaacgctattagaatcatttgattctatagctttataaggaaaggaatgaatattcattcctaaatagatttaaaaaatgagagtaggaaaggatgtttgtgtaactaagggaatgaacattcattccggaaagactagtttaatagaatttacaaaataatgtaatagaacaataggaatgaacgttcattccgttactaacgtgaaactttcaaaacgggagatgattcaaatgagcaagttaaaaagttggagaagtttatcttttctattatggatagttattactattacaatggtcgtaacgatgcctaatatggatcaattagtgaaagaaaaagggaaaattacaatccctaatacaaagcaaagcagtattgctgacaagatgatgaaagagatggataaagaaggggttgaaaagtatgaaattatagccgtttttaatagtggcaataaggcagctttaacagatgaacaaaaaaaggaaataacaaaaacaatcaacgccctgcaaactgaaaaagagcaattaggaattaaggaagttgtttcacatttagacaataaagacttggagaaacaattagtttctaaagataatacgactattttaacgcaaatatcgatagataaaaaacatggtgaaatatcaaaagtttcaaataatcttcatgaaaaagtgcaaacgaaaggggtaaaaacgtatttaacaggaagtgacttaatagcgggtgattttcttaaatcctctcaagagggagtgaaaaagacagaagttatttcaatcattttcattcttgtagtattaatcctcgtattccgttcaccagttgttccaattgtttctcttcttacagttggtatatcgtatttagtttcaatggggattattgcccagcttgtagatcaatttaattttccattctcaaactttacacaagtgttcgtagtcgtcgtcctgtttggggtaggaacacatgcccatcaacttaaggatagaaactctacggttttccattaattgaaatgaaaaaacaccccctatttatataaaaaactccccttgacttctcatagttggtctttccttacgatttagttaaaacatatgaacaaacttttcataaatagatgtaaaactgaagcctatcacaaatacaataatgcacaaatatgtagaaataaggtatttgaagaccatacctggccgcgatgcaactaatgtttcataggattctgcccgtagtcttctcattaacttaatttgattattaattatttctctacttcgactttcgtccataaccattgcttgttgcaaggaaaccataaattgatacgcttctggtatatctaattgacgcgcaaattccagatatggttcaaaatcccccggatcaagttcaatttgtgcaattagatttttaactagtggtcttaaattatctgaagcatattctattgatctcttagtagcttcatatgctgtgtattttccaatcatataagctaaagaaatcatatactctggtaattcaagctctagtcttaattttttcgccttaacatcactatttaatttagattccttcacataaaatcccataacagcaaataccaaagctaaagggaaaattactatttttaaatccggaacataaaatattaaactagctataactaaaaaatttataattgagaaggtaagtttactaataataaactccattggtgtaagactcgaattaactttttttagctttttctctaattctttttcacgttcttgtgatatccaattcttctttaattttaaaattgggtacagcattgtatacaaaataggttgtcttttatttgccaccttacttttttttacaatgctataaatttgaaaccttttacttttttgtctttccagtaccaggttgtaaaccactaatacaaagagtaagactaagataaatagtaaaattaaaggatatagattcactctatcaccttcttattattttatttttgtaatatcttctgtaggatcgtagaaagaatgtttctctatcttaaatgcactaaatatgcatactacaattattgctaaaagaatgaaccttccttgtaacgtccttgcaaatacaacgtaatcatcggcattgatcgccaaggctgcaaccggtaatgaagcaagcatgatagccgtttgcttgaatgttttcctttgcggttgcatacctgattttaattttgcacggtatatttttttatcttgaaattcatgtgcaatatttaaaagtatgtcatccgtatctttacctgtttttgaaataaggtctaacatatcatgaaagagcttaatatctttataattatatttctgtacgaatgaatgaaaggcatctctaatactctttccatcttccgtgtataagattaagcatctttctacatcatcttttataggagattgtagtaacggcaaaacactcttaaaagctagtgtcatactttcatgtgtagaaactgcatttgctacagcttctaaataaaccatcaactgattttccacatattcttcgtatttcttacgcttataaaagccaatgattggcggaagagatactcctaataataccccgaatattgttgtacttaatgacataaaaaaaccatacaatgcaacagctccaactagagtccctataattagtatgatttgataatccctgaaggataaattccaattaaaatctttactttccctcagaatatagttaggactgatccatttatacaatccttttccctttaaaaatttcactatcttactatcatctttttcattcgtaacaattaacttgcctttttttcttctttgaattaaattgattcccaaattaactacaaagaatatagcaactaccatcaaaaaatatggaagataattaagaaatcccaattaatttctccccctctttcactacaggaagttcttttgtaacctcaagttcagacgttttaatccctttaaatttcagctctttaatcatacgaccactcaatttccctaccctttcatgggaaccattgattataaatttcgtttgatcatgttcatcctggaattctttaatttctttaacattaaataaatatagaggtgtataaattagttttccattttcatagccgatatactccacaatttcggttagtcttcgttttccgtctaacattaattcaaagtgcataccgtaatcaaaattcaaagcaatactttgctgtaaatattccttggatatattcacagcttctaaacacatactagaatagcgttcaacactatcagctgcgcttggagagtgtaaacttgtaagaatcccatgacctgtttctgctattttctttgccccccaagcttctctccctcttaactcgttaatacatataatttttatagtttgtctgactacaccagataataaatcttcataagtaacggaggtagaagaatcttctctttccctggttaaccaagtacttaaattccattcctttgaataaatttgtttcaaattcatttcatcaacgtcttgtaataccaatgttttatcggtttttacttttttacccaagagatatttcataaattccgtttttccagtacctgtttctccagatataaggattcttgaacgcgatctcatcatcgctgtaaagagtggaagcatctctttacttgcaagaccttcttcaactatgatttcatcattgattcttaaagtcttaccaaatattcgaatcgctaacgaaacaccatatttcgaaatatcaaagcccactaagttaattctcatatttggaaaataggcatcacatttcggcttactatgtgtccaagtttgaccagatgcgtttacaaatttattacataacgctagatacgcttctttacttttaaaggttacatttgaaagataatcccctttctctaaatcctttatccaaatctcgtcccagttattgcaaataatatctgtaacagtgtcttgttcagcaaaagcttctaacacatcaagacccgctacggcgtctacaattcctttagcaagttgttctaatgtaaatccttctatattaggctgtgatgtaatgaactgtgaaacaacaccccatagtgctttctttttgacttcatcaccaaaggattcttgaattaattctttatgttcatctaataaatatttctttacagtatcaattaaatcttgaggtatctctttattagtagttgtagatgtgtgtcctccagatttgatgatataaataaacgtttctatattaatcctttctggcattaaaggtatgtaacctaaatcttctaaagaaatcacattttccataaatttcaccacccctagatcattcaattctatttacttttgaaaagtcggaatccattttgttcatttctgataaagcaccctaatttcctagcaatatttttcatatattcatctattgtttctgatcccaactgtagtgaaaactctatttccgctctttctggatcataaggaatacaagctgttacctcaaaatcaactaacattttgtagtcctcttcatcaattttattgctacatagattaaatacatgtacccactctttgtgttgcaagtttgccttttcaaaaacatttgttatgttcttgtatcttgataaaacaattggatttcctgttaaaatactgactacactatcacatttacttaacataggtaatccaaaaacattttctatttgattaggcaactgaagtattacataatcataatctagtgcctttaatttactaataaaatcattactgaacttctctactaaagtttctacatttgttttgaaacgaggaaagctctcttccgcaaaatcattgctgaaagtcaataattccatattactcggaaaccaggaaaatctctttccctctctaacctcattttttttcaagatatacttttgaatatcaaatcttccttctagaatggccttttccataaacaattccatatttctttctggattagatattgatgttttatgtgcaaatgtagcatttaaataatctaattctaaatacagtacctttgaattagattcacctataacttttgctaatgattgaccgattgttgttgtgcctaatcccctttgcacaccatatatacctataatttttcccattatacaaactcctttcttactttaatttatatgactgatcctgaatccactttgtaatcaaatcgtcattcgttctttcaacattggcattataagattcaccagaagcaacaggaataatttcaccaattaaggctcccttatttaacaattgattttcttcatctgaaactgcgaaagtataaattttagctaacggacgattcttcgcctcattatttaaattgtctttgtatgacccatcaacttctacacttttgggatcaaatacatttgtagcattactatcttttactgaagttaccctaacatgttttgcaacacgcccaaatataggcttttcagtatggtccgactcattcttcaccttacctttaaaatacaggtctacataagaatccgggataatactattaccagatgacgtttcaatatctaccaacaacggaaaagctacttcacttttcttcaaatttagtatggctgcatccggcaattcatcctttggaactactttgtccttgtacaataaagagttctttgaaactccaaatccgttcactgtatacttaccttctaaatcttttacatttgtaatagcattaggggcaattgcatcaccaggaatgaccctctcttgtaacatatcctttgtaatttttgttcttggtggaatatcaactttactgtaataaaccttagtaggatttatcgcactattaattttgtaattttcatatcctgcaattgtcgctactaagcctacagcaattaatacactcacggtttttttcggaagctttttcaccaatttcttcaactcctatttcgttactttcttcgcttcaaaaatcatattttcgaactgtctaactgtcgtttgatcatccggttcttttaaatatttcttaataggtatagcaaaagtgttgtatgattcgactccaatcattgctggttgagagttaatggcataaatatttaatcgtttttcaccatcatggaaatttgactgattaacatattctctaatcagggtttctttaacgactttctcattaatggttatttcttcatcaactcttaattgccccatattaattccttttgacatggctgtagctgttgcttgatgtaagctattatcttcatttgtatccgctgcaaacataaaaccggtacttgctgtaaacaacataatcccgatcaacaccagcattattacaacaaattttggtggttgcattgatttgtacacctcaccaacatattttttcgtatacaaaaaacctgttctaaaagctaattgcactttcaaaacaggctttcttattatttaaaattaaatctcgttaggaaatcactattcagattgacgtctgaaccatgcgtcttgttatattctttaatttgcttatacatttctggagtaattttataactctccatatgataccctgttggtatatcttttggatttggatattcccatgtattccaccagtccgataaactagttaacataggttctttatttttccagttccatcctacttgccctgggaatggattctgtggatttacagagcgtttaataaaatcatcatttccttttttatcaccaatccctgaaccttccacttcaatttttcccgtaagacaaagatttaacttattaacacccgcaccataagccattgctttaaatgaatacgttccatctgcttgtgtaaattcggtataccactttctcccgccatctaaaatagtttcattaggattgtatttaggatgctttttatagttatcattaaatacatttcctgaaaatttttcaacgtaagtatgaggtaatgaccaaacttgattatatcctcctagtgtttcatccattggtactttgtatccatcctcagtttttgaatactgttgatgttgaaccattgtaggaaggaaagatgttgtactcttcacacccgtagcatgacttgatgaatcttcatttgtgtaggttgttttcacttcataactaaatccatatcctgcccttattttaggctttgatatattcacaatactacctgttaagcgttcatataatgtgtccctatctcctgcgttattaattgtacgcacaacagctgttactgtagctgtagaattaggctgtgaacaagtagaggtttcatgtgaagcaacattaattggggtatccaatttattattattaaagtttgtttttaatacatctttactattatcatattttcgcggcttaggattgatctcagcctcaatttgtcccgaacttggtactttccaatcataatataaaactttagattgtccttcggataagttgaccttctgttgtcctactatattatcttggaacctgagaacaacatttggagtggtgtttttatattcactctccaatttatctaatctatcccttttattcttctctttatttaatttttttgtttctgtactaatcatcgttaatattctatcaagattatattcatacgatgaacaatcacggggaacacaatgttgatttccttcttcatctattgtacaaattctatcatatcgacaaaaattcaattcttccctcgcgtcttgttttctgtcctctaatttagaaagttctcgctcttgatcctggatttttcgatctaattcttctcggtatttttttcgctcttctgaaaaatcagctcttgaaaccttaaccggtgtttttacattatcaccagattcaacagtttcaccctcaatacgatctactgaaaaatccattttgtacttaaatgtatcttcatcaccttcaccacctggagttggtggtttctctttgtcacaaccatttcccgaaatagtaaaggaagttttcttttcctttgctggtctttgtacagcgtcatagacttgtaatttcgcttcaaacttcccacaagtcgttggctgccatcgtatagggctacttgatcctttccctccaaaatatccagcatcgccctcttccggcttctctgaatctttcttaggattagaacgaatatatccttctttagtatcaatttcagaaccatctttatatattttcagaacccattttactctatttcgctccccagccatttccgcataaggatttatagtttctgaccccatattattatctgtatatcctttatttttggttacatattcaaaaccttcaacatgaaaatctactgtattacttttaggaccgtcagatgcttggaatttttttatatccggaaaactagtacgtacaataaagatattaaatttgttaatatccttttgtagccctgcacctgccataccacctgaaagataagccatatccctaatccaatagaatttaccatacgactttggaaacgcaacacttgtcacttcataaggtaatatatactttaaaacaaaatctggattcccccgatacttttgtgaaatcacttgggagtttaccctttctacttctgtaatcattctattacctagtgggataccacttcctatatatccatcgttcgctacattaacaaaaggttcactataatcaacgctctgtaccaagttcgctctttggtttccccaatcaaagctaccgttgtaaagagctgggtaatgaaggtcagctgtataataaatatcaggtggtgcattaggtggtaaaaattttcctggtcttaaataattaccaggcatttgcaaacccttgctccgtatcaaggtttcattctttccatcataaaaaggaatatcactattccttgcatatgcacaattaggaatacataacaaaataacgaaaataaatactaataattttgatttcattatcttcctcctattatatttcgaaggatattttaatttctaacaaaaaatccgttttagtaaaatactaaaacggattttctctttatttcttttcaattataattgtaatcatttggtctgccattgctggactgatacgaattttgtaatcccctttttcaacattcttaatcttcattggtgctgaaggaatttcttgaatttcttgatccaaattcaaatctgaatttacaagtgtaactaattctttcgtaagctctatcattgcattatttgataccctgaaagtaactctaaaatcatttacattcataccagctaaccaaagttgttctcttgcaccatccactaattgtacaattgcccctacttcactatacttcaagtttgttccatacttgctatttatatttttaacaatttgttgagcgttagtagatgctgctttattaatagcttctgatccatcataccaagcttgtgtaaatgtaaaatcattcgttgctaaacttgtttctaaccattctggaatgttaactggtttcgtttcttctccagtgtttggtttttcttctggcttaacttctccgccagtattcggtttttcttctggcttaacttctccgccagtgtttggtttttcttctggcttagtctctttctctattacattaatagaattaaataaaaactgactatattgttctcgtgttacaactgatgttggtgaatacatattgccacctgtaccaattgttacgcccttctcttctaaagcaccaattgccttgtacgaccaagagtttttatcaacatctacaaatgatgtttttttagttccctcaaatttgaaagcatttgtaagtacttgcgccatttgctcgcgagttaagatgtcatccggtccaaatttaccttctccataccccttaataataccaactttagcaagtgctagaatctctttttcaaacatatgccctttaatatcgctaaatgggtttttgaaattacctgcatctgctggctttaagtagttatagatcatgcgagcaacttgcccacgggtaacattatcgccaaaaccaaactgtccattcccgtaaccaacaacaatatttctattcgctaagtttgtgatcgctttagtcgcccagtggttatttggtacatcatagaatgatatagtatcagctttaacttcagctggcttgatatggtcaacattgattcccatacccgttcccatcattgttaatgctgccgttgtagttagaattgtttttttcatgattaatcctccagtttaatacttcatcttaatatacctataatacaaaatatattaccactgtaacaatactagcgacataaaaccagcaattatagaaattgctgccggaaaacggtaactcatactgattattttcaaaccttctgttgttagttcaatgctaatcttcagaaatttaaaggaatggtagccgcttattgttctggtaaatatatatttttttacaaacaataaaatcacaattaacccatatattactgctgataaaatgaatactgttacatgtaataaaatcggtatcaatagccaatgtatcttcaaagaccctaagatatataaatacatagatgaaatcactatcatttttgtatctccaggcgaaaacttagccaatggcattttttctctaattaacacaccaattattaatgcaacaattgcgattacgagtagagctaacacattcttattctgaattacacaaagaactattgaaagactaaaaaatattaagtgccaatagtttttagtaatcagatactttaaatccataaaaacatttaaactcatgtaaactgtatataatatcaaggtgttcacgaatttttaacatcaccacctataaaatctaatttcttataattagcgattttgaagtctacttgagaataatcaatttgtataaagtaaaagaataaaattttgtcaattatggctagattgacgacctcgtatgaggctgttataagttattcccagtctaacttataacagcctcacacagcacaacgttttcggcatgtacgaagaacctcgtatatctaccttttgatattgatcgcttcatcgaaacgtctacttgggatatttctcacgattatatcaatcagatcatcgatacactgttaaattacggccacagatgagttttaagttccactcaccaaactctactcgtcgacctaaccctctagtgaccatatcaagggcggcacgcaatattcatttatcaaaggatcaatttgtgctgtttacaaaattccaagtggaatccccaccaaaagatatttcattcaaacggaatcttaaaatactctcacagcacacttcaaaatcgctaaacttcaacttactctgcaatctttttgggttttcttatcactacaagctcatcttctggatttttccttttagcaataaggttattatttttatccactactgatcgtaccttataatacacttgggctatttttacgatttcccctgttttattttcgatagcgacagcacctcttaactgatatgttttcccatcaaaagtttttacagagtgagctttacaagatacatcataaaatgtaagcctactttctttttccataaactcccccctttgaaggtattttctatcaataaaagaaaaataataataaaataatatttttttatcttatcactgcttataaacccgtcttatcatttacaatagacaagggtatacataatgataaaaagtaaatgtttgaaagcgattagttaatgaggttatttatcctcaagtttggcatgatacaaactagattcgaacagtctttcaaggggttcttttaaatatgtacttattgtcctagctctttttgcattaacaccacttctgcctgtttcaatgctataaagagtattttctggaatattagtacctaatgaaagttctcttacagttaggtccttttcttccctaacttttcgcaaaactgtcgatttagttttatttgacaaagccaaatactcacctccctgtctatattctatttgattatcaatcaaacgtcaactgtttgatgacgtttttttactcctacagaataaagaaggttaggtgacatctactaatcgcaataacatacgaaaggttgattggattggaagataacatttttggtagaaatttaaggaatttaaggaatttacaggggttaagcttaaacgcattaggtaaagaacttggcgtaacaggaagcgcaatatcaagttgggaacttggtaataaagaaccaaattttgatatgctaaaaaaagtatccggttttttccaagttagcaccgattatatgttaaactaccaagtttttgacgatgaagcacaaagaaaagaagtagtttctcaattagctaatgaaatctacgaaaggtacaaaaatatcccagatagcaaaaagcctatggttaagcaagaattaatcaaatatgtgaattacttaaatttcacagcacaagctgacgttgaagaattaaaaccagataatgaaaaataagtgggtagggtatctgttacaggatactctactctttattttcaatttttcgaagtacatctagaatcttataaaaaaattccactggattttcttgattatttagtacatcttcaaataaatctttttccatttgttgttcaatgaactgttgatcaatttctttatattgcatatgcataaatctccctccactgaatattacatttaatcagattacggaattcatttaaattcgacatagaaattttggtgacattaaacacaaaatacgataaataaaaatataacggttgaacgatattatttgtacaattgaatttcgttcaaccgtcatacaaatagctattctttcataagctcttcggtctttatcccaagagcttcagctatttttttgatattttgataagtagggtattttctttccccactttcaatttgagaaattgtcggttgtggaacaccggatttttttgctaaatctaattgagtccatcctttctgcaaccttgcttctcttatcatagtcatcatatatacagccccttaatattcgatatcgaataattaaattactgtatatatgatacgagcctaaaataaattcgggaagggttaaaaaaataccccttcccgaaatgttatttaaatgttaaaatataatatttttacgatttttaaactatcactttttaattttactattaatcattttaaattgtttttttatagtttccactgatttaaacaacatatcagcgatttgattcttatttaaccctttttcttttaacttgtatacctccctctccgaaggtgttaaaacactaattctcctttctgtcttcaaagcatttacaagtgtaaaagaaacatccgaatgaatacttaccttaccttgatatgcatctcgaattgtacctggaatgtctctatatgaggttttagtcacataatttatagcgccattatcgaatgcttccaaaatgatttcttgttcttcccaagaagtcaacatgataatatttttaaaacctctatcattccaatgatttgcaacctctaatccatttaaattttcattatcacttgaatcagataatgttaaatccagtagtatcacatctatattttcgatatttattgaaaaagcctcttcttttgtcgtagctttttcaataactgttaaatcattttccttctctatatactcacacaaacacttcatccatactggatcatcttcaacaacggccaatctaattatagtcatcccttacaatctcccatctatattaaattgttcattaatgtcaagaactctcctggctggaagtgacaaagtaaatgtagtcccttgattaactttactcttaatagaaatgtcgccaccatgcttctgcattacattataggagtatgtcagacctaatccatagttccctttcgtgcctttggtactaaagaaaggatttagtacctgatctagtttatcttttggaatccctttcccactatcagtaatatctatatatactttccgtctagttttataaagcttaactaacaatctcccgtcattactcattgcctctaaagcgttcttaatgatatttaataaggtttcttgtatatgtataggatcaccctgcacttttacatctacttcatactgtttaataacctggacatttgaatttaaatacggttgaagcaaagctaatgtagattcaatattatctgataaccaaaagtgtgattcctttaaattcataacgtctaatttactttgaatacgcgcggaaagttctaaaacatgttgagtagaattaagtgctaactctatactctcattagctttttcagttaaattatgttctttcaactgactgactaaaaagtcgatttttgctatttcatttttaatcgtatgatttaacaaagctgttccagatgcaacagccttcatagtagtatctctgtgctgcctttcgaaacgaattttaacatctaaaaaaccgtattttataataagatacccaaatataacaaactgaacggcaataaccaatggattataaaaccatacatcttttatacctaaagcttccaaaatgatatttgtaaccaaggcaaaagtatttactggaaggataactatacatgtaaatattttgtttttctttatagctggtctagtctccctaaaagtagaattaatcattaatatatttgttcccataacataaggaactgtccaataagccaaaatgacataatgagttttaaactcaggatatatttgatcaatactatacatatagaagactggaattaaaaataatatatttcttattattcttttaaggtgtgaattagtcctaaatactccagaaaatacaactccaaacatccaaatagcatatggcgttaaataatgcccccatgatgttgcgattgcatctatccataaaattaattccggacgatctggccctattccgagcataaccccaagaccgccaaacccaccaaacaaggcaattgcgctcgcccaccgtgtttcttcatttttaggattagttagaaataatatggctgccatcatccacagtaaaaataccagcactatcatatatacaccctaacattattcgctttcgaatattcgttttcgaataaattctatggtatccaatacaatttgttttcttttaagtacaattccagcatgaccacagttataaagataacgcgtgggtttattccatgcttcccaaagataacttgtatcctccatatgaacgtattggtcatactttgctgaaatcaatagaatattcttttgattcattattggagtagcttgacttggttcagtaattttccaactctccacgagttcctcatatgtaacaccgtgaacagacaaatccttcttaatatatttccctggatttgtgttccaaattgaatatgaaagacgatttgcataaaaaacagaggttaacacatcaatttctggttcaaccaatgctgttaaattagtaataaatccacccaagctcacacctattaatattacaggaccttttttattctccttgatccaatgaatcaatcctcttagatcaacaaccgcttgttgcgttgatttcacagtacgttgtatgtccgcacttaccatatactcaccactaaataatgattcttccggttctctagcgaaatgataaggtagagtaaaataatataaattccaatctaaatctatcattttttcatgaaagatttttctcacacgttcattattttccatacgccagccatgaacaaaaataacattaggtgcatcctcattactattcagataagcttcaccgcttaccaaatcattaaacaagtccccacttttcattagactttcatattcgaatttaacgattttatttttttgtaaattcgacacttcactattaaaatgcatattaattgttcgatctactttataaaactcattaatatcttcaaaatccatttccggaacccccgaaaattggtattctttgcttctttttttatgcaaatcataaagcgcgcataaatctattaactttgaaaacaacaattttattatccccccaaatgtatttaaataaaaaaagctcaccaactataaaaagtattctttcttacaaaaatactagattataattaatctgctcatcagatcttagcattatataatttgtactctattaaatcaaaaggtagaaatccccttatttcccttaataagatatatagaaaaggtaattcaatccagattaatcaaacagaagaatcaagcctagtcactaggttgatatttcataaaaaaaaagatagaatatataacataatatatataattaaaaaagagatttatgatatagttatttcatataaacaggaaattaagttcaattcatttaaaaaagacaaaaaataaaactccacccaccgttttcaattgattcgaagtttggcgactagatcaattgaaaacccacgttagcagagtttttttacaaaattaatattatggttaaattatatcataactaatgaagttttgtgaataaaaaactcgctaattttccgatatcgggctggaaatattagggaggttttttcgtgttattaaaaaattttatattaagcaaagcaaaacgagaactaagtcctcaactggatcgtatatctactaaaccaggaaatattaataaagccgtaaaaaaaattctaaaggagattgatatcattcttttagaagaccagggctttactactgaagacatttctttacaaactcctcgtaagtacaaaggacttgaaacaattttatcttatcttgttcacgaaggtttttcttgtgtgaaacaggatgtgatagcccaaaaagcgggaatttcaaaaccccttatcaatgaaactctttcttggctagaaaaacttggtatctgccaccaaattagaaatcgtaaagctggaaagaaaggtccttctgtatacattttaacaatacataataattatcaaaaaatcatagattactttaaacacaaatggcatctagcaattgagataacagaaactatctcaaacctaatatccaagtggactctattaaaagaaaaaaaagaagaagttacagacgaacaagtagatacagatccaaaacaagaagaagctaatgaacaaagtgaagaacctaaagactattttgctagaaaagaagatttcaatgaatatttaagtaaagatcaacaaagagcatggcactatattatgagttctccatttactaatctgtctgaaaaagatgcatatgcaattgcaaatagaatgccaccagatatcgacagagatgcttggtatttcttcagacaagctgccgatcgttttgaagctagtaaagctgataagagtaatgctgcttatttcattgaaatatttagccaaaactataaatcttatttaaaacgtaaaaaagaagaagctgaaaaatatgtttcatctttatcaaaaccaaaacaaaagttaataatttacgattttatcaaaggggaataatcttgcttaaaatcgccatttttatagccttgtttaaaaattatagcaaaacaaggctatttgtcatgcgcttatattatttcctaaatacctctcatacttcacatccaaatcaattaaaaataacagttaatttttagcatataatggaaaaacataaaaagataacctactaaaattgccgcaataaatgaaccgaaaattcagatacctcctttgtttctaccaaataactactaagaaaaaaaatcaaacttcttgttagagtaagggttaagtgccatttttaatttctaatgtatttaatggttttaatttttaaaacaagatttattaaataaaagaatcttatcataattcatcaaatttttttaaacaccttttgtcattctccctactgtttccctaatcctcgctaaaatagacacccaatatgtaaatgtcaagataaacatgtacattttcgcttgtttaagcatgtacaaaatcgattttgtacatgcttaaacaagcgaaaatgtacatgtttatcttgacatttacatttatattcgtgtaaaataaaatgagaacatatattctatataaggaggcaatcaaaatgatagctgaaattgggaaactaaatgatggatatattgtgaaatttgaacgccaatttccatatacggcagaagaagtttggtctgtattaacagaaaacagtaagctgaaaaaatggatgtccaatttacagattgaaagccttaaaacgggtggaataataaagttcgacatgatgaacggttcattcataaacattgatattttagagtgtcaagtaaactcagtacttgaatttacttgggataaagatcgtgtccgatttgaaatacataaagaggaaaatggtactcttttattccttaaagagtacattcatgaattaacagatcatacaccgagagatatagctggttggcatatttgtttaaatcttttttcttacgttttagaaggagaagagaaagaattttctaaagatgaatggcaacagtggtttgaaatatacaaggataagattcatgaagtgagaggataattgcataataggtaatattcattatgtaattattatattgcaaatatgtttttaatgagaaataagaatagaggttcatatgaaggtaaatcaattgattgctagtcgcgatcgaatcaattagtgaatttttataacctaaagaaggaagaggatataaaagtaaataaagaaatataattcaaacgttataaacagttgactctcacacaatgtcattgtttaagataaagttgagcttcaaagtagatgtaacttataggaggaaatcatgtttaaaataggggatttttcaaaactatcttccattagtatacgaatgttgagacactacgataaagtggaattactacaaccagtaaaagtcgatgagcagagtggatatcgattttattcagcagaccaattaaaaaaagtaaatcaaattcaaacgttaaaagctatggggtttaatattgctaccatcaaagaaataatagaatgcgataatatagataccataaaagagcaatttttaaatcgtagtgctcaaattaaagaagacatgaataacctccaaaaacaattacgtctcctcgaagactcaatgaaaacgatgagagaggatgttgttgagatgaattatcatgtttcaataaaagaaattccagaaagaactgtagctagtgttagaaagattattccatcgtataattgcgaaggtgatttatggagtgtattaatgcaagaaattcaaatggaaaatattagcattgcccaaccgagttatagtattgcggttttccatgatcgtgaatacaaagaaaatgatgtagatatagaaatacagctaagtattctaggtaagcacgaaaatacaaaagacgttacatttaaaaatatggaatcgactaatgtagcttctataacagttaatggaagttatgaacagatgacagctgtaaatgaggctgcggcaaaatggattgagacagagggttacaaattagcaggcccgatgtttaatatttatcatgtgagcccagcgatggaatccgatcctaataagtgggttacagaagtttgttatccagttaaatgaagataaagaaaaaaggcattatttatatgccttttttctttataaacttatccataaatatcaagataaattacttcttgatttgattcgtcaactactagcacaattttatttgcaaatgtacaaaatgagcggattataatggattcctttaatgaatcttctaaaaaccaacctgttggtaataaagaaatgcaaccattttttggaaatttcagcaatgtttacattagcaacaaaagccaccgtaataaggggcttttgtcttaaataatttaatgatatgtgtaccctccatctggaaataatacattacccgtagtaaaactattttgcattaaatatagaacagtatgtgcaatttcattattatggccaggcctttttacaagagaaagagatttataagattcataagcagctagtctattttcgttttgttcattctctctttgtatcgttccaggagaaacaacattaactcttataggagctaattcaacagctaaagctttccctaagctttcaatagccctattacaagctccgtaagcaggcgcacctttaattggtctttgactaaaggcaccggacattaacacgatcgatccagagtttgaaagaaaagggatggcatattttacggcataatattgaggccaaaactttccgatgaagctactttcagcaatttcctctgtagaggtaattggtccaagtgtgtaagaggctccgggtgtgaataaatgatcaaagttcccaactgtcttgaaaaaattttgtaattgctctttattttgattatccaatacgtaagtgtggagatgattgctatttattaattttttagcaatctttaatttttcttccgaacgccctgcaataataatatgtgcaccttgtttaattgcttgtgttgccgttgctaatccaataccagaactcccgccaatgataacaatacgcttatcttttaatgtagtaatagacatattttagccactcctttaataaaaaactttagaatataacttatgcttttattattcgctaaaagggatcaagtgaaaagtacgcactttgtatgtacatagtcgcaaatttcgtactaatcgctatttacgcggataagtaataagaaaaattgctaaatatggtttatcccgcattaacgggcagtaaaactctcacctcaaagttaggaaaatgcgaggaagttaggtgagagatcaactgcccgtaaacgcccgattggttcaactaataaaaagatttatgattattgctgtaaaatcttaatgtattttattgtaaaagctgcttttcgtttaaggaaaggcagcttttttatatggaaataatgcaggggaaacttaaaaaaataaaaataagtaaagtgttaatcaaaaaaatgaaatatggagcataattgttttgaaacattactgtactagcaatgaaagaagctaacatattcatactaaagttgtagtttctatataaaaaatccatccttccgtttgattttatctatttataagtgtaatacaatacgaatagataataagaaatgagggagaatgtaaagtgattacacatatatcagatataaaactacaaacggtttccatagaaggggtaaaacaagtgtataaggacatattatcttttccaataaaaaaagaaacagcatccttcattcaatttgaagtaacaccttatacaacaattagttttcaagaagtgtatgaaccaattgcacctgcacattttgcttttgaaatcccatattcaaaatttcatgaaacagcaagatggcttgaggagtctggattactcattgcgaaatggaaagatggtcatacaattgatgaagaggatggtcgattcaatttatactttaaagacggagatggaaatctactcgaaattatcgcgcatagttatgttaaagaagatgtattagtaccgcagtcacctttaaacattttatatgtaagggaaattggtcttcctgttaaaagtgtacctatttttagggaatggctgaaatcaaatctaaatatgaaaacgatggaagacggggatatttttaactttgtagttggtggcactgcttatgtcgtcgcaacttggtggcagcgaccttggattccaatcgcgatgaaagctttaccaccgaaagttcatgtttctttcggaacagcggatctcgcatttttacagcgaatccaaattaactttaagaaaaataatgtgccatttgaatgtaaacataatgaagtgtcatttattgtgcagggatattcattttctattgtgtatacaccagagtttcattccaatattcctagcaaaataaacttaccgctttctatatagttatagaaagcggtaagtttattttgttttaaggaaaattaaagtctagttattatgttgatttaacatttgggctattccttgaccaaatgaccaattctccataggtgtctcgtgtagtgtaatgaaaacatcagcagtagagatttgtaaagtattagctgtactagtggctatagctttatataaatcttttttttgattaattgttctcccaggtccacatgtaatagaaatataaatcatattattggatcgttttaatgaaccttctaaaagataagatgaattataaaaaagttgatgagaaggataaggtaaaaacatttgaaaataatcattttcgggaatattgaaatgttcaattaacgaatggtgaatttgattgcttacattttttaataacttattatcggataatttttcaggatgataaacagtgacaaatggcataatagaggactcctttccttttgattttattttacttccaatatttccatttgtataattgaaaatatattaacgaattatcaataaaatcgatgaagatggtgtatgaaatggaaatgaaagagttacttacatttaaaaaaattattgaagaaggaacgttttcacaagctgctaaacaattaaactatgcacaatcaacagtaacaacacatataaaaaagctggaaaatgaaattggttttctgttatttgaaagaggatgggatgcaagattaacagaagaaggaaaactttttgcagaggaagtagaaaacttagtaacacattgggaatattctataactcaagcacaacgtattagtaatgaagaaaaagggagtttgagaataggcctattagaatccgttgctaaaaggttaataccaataatattaaagtttttaaatgctgaaaaaccatatatacattgtgattttgtagtgggaaatacagcacttttatcagaaatgatagaacataataagattgattttgcggtgtgcggaaataatgaaaataaatcaaaggtacaattcaccccaatatgtgatgaacagattgaatttatagtgaataatcccgagcatcctttgttacaaaaagaatccgttgaagcatttgatattatagattatccagttattgtaggagaaagtaattgttattcgtatcaatctgtaagttctctcctagcgaaaaataatttattttttaaaagagtttataattgtagtgctttaaacctcattccagaaatgctttttgaaaatgtgataggaattatcccgaaaggtacaattttgaatgaagaaatactatcttttaagattaaggactttaattctaaaatcccgattggtatattaatttctactaaaaataacaattatttaagtcaaacgaaacaaaaaattatcaacatcattaaagtcgccctataattatgctgaaaaattatatggctgttttcgatacgtacttttcttttagcatttcagagatttttgtaataataggatttatgtgagtagaaggatttcctaacattgcagtgaatttaaaataggggtgtagaatactatatggtttaaggagggtgaaacttgaacttaggtgagccaatggctaaaggaaatacagcggaaatttatctgtatgataataagattgtgaagttatttaaagaatatcttccaggtacagagtctatgaatgaagcaaaaaaacaaaaatatgcttattcatgcgggctgccagttccaaacgtatttgaagtgacaaagatacacgatagacaggcaattattatggaatacgtaaaaggtgtcagctaataacaatgaattgctaaataaattaatgcttcagtattgtaattaaatgagtaaaattattggattttgtttacaaagaatatagtagtaaaaaaggagtctgttttatgaaaactgatgaatcgatttcattgaataccgaatttgagaaatccgctcctgcgctacaactttcgaaattacataagcgattcggtgaatttattgcagtaaattgtattgatttaactattccaagtggttctttttatggagttgttggacctaacggagcaggaaaaactacatctttatcaatggctgttggtttgttacgaccggatggcggaaacgttaaagtttttgggattgatgtttggagtaatccaaaacaagctaaaacgttgattggagtattaccagatggattggctttaccagaaagacttactggtcgcgaattattaacatatatggggttgttaagaggaatagatgccaatgaagttgctcagcgggcagaagaattacttgcagtattagagttgaataatactgaggggactttagttattaattattctactggtatgcgtaaaaaactcggccttgcacttgcacttcttcatgcgccaaaattactcgttctcgatgaaccgtttgaggcggtagatcctatttctgcaactactattaaaaagattttacagaaatttgttagttcaggtggttctgtagtattttctagtcacgtcatggcattagttgaacaactttgtgaccacgttgcaattatttcgaaagggggagtactttcatctggaaagatggaagatgtttgtggtgaagaaaaactagaggatattttcattcgattagtaggtaaacccgccgctaaaggaggggaattgtcttggttaatgttttaattcaaatgaagttatcaatacttaaacattcaatgaatcgtggcagggcagttctatttattatgacaggattagttggtttgttgctagcaattggaactattctacttttttctttttatccaacagaacaaaatatatcaaaaagcattctatatgtaacattcgccatttggacagtaggatggattataggtccgatgcttactggaggagacgaaatattacgccctgaatattttgtgttgcttccgctcaattcttataaactagctaggatgcttctcggtgtaacttttataggagtaggaccactggttagttttttagcttttataggattattaatttatgcagctagaattagcatatatgcgattatagtagcagttccagcaattattttgcagttagtttttgtagtattgttatccaaagtaatagttagtattatgggtgaggcgatgaaatcaagagtcggtatggaaatgggagcgatgttcattggtttcatcattgcatttctaaatgtcggctggtatgcacttcctgtaatcaatagaatcatatttagtgatactacgctattttacatgattccatctagttggacgatacttgctgtagagtacgctagtcaatctaattggttattagcttttattttcttaggtacaataacaatattttgtgggtttcttttatttatatggactatattattgactagacgtaaagagatagattcaaaaaaagttcaagtgaagattattaataagcattatagaaaggcttttaaaatcttttttgaaactaaaataggagctgttataactaaggaacttaaaagttggagaagagatccacaacgaggccgtttcctgcgaatgggcatatggataggtgtattttatgggattttagttacgattgctaatataccttacttaatgccttgggcggggggaattatggttgtatttacaggtatgtttgcttgtaatttatatggtttcgatggaagcgcgttatggttaacgttggtgacacctggcgcagaaaggattgacgtgcgtggccgccaattagcttggttgatagctattggtcctgtggcaattttaactacaataattttcactttttctagcggacttactttcgtttatccatgggtatttgcagtagtcccagctttacttggtggggcagtcggccttattgtcttattttctgtagttaatttaattccaattactgatccacattgccgtggaagaggaacgataatatctggtgacgatatgaatgcgagtaaaatgtttataaccacgtggctcatgctgttgatggtgctagtaacaacgataccttcgttactagttatatggttggggacatcattacatatacaattcatacaatggttaggtgtaccgactggggcttgtacgggagtgtttttagcatggctatttgggcgtatcgcttacaaaaaacttgaaagaaatggccctgagttgctatttgaaatgaaaagtgggatgaaaattaacagtgataattacaaaaagaaaattcgtaataaagaaatggaattaccgaagaaaaaacttgccgttgttattcttcttgtgtttatgggaatctttttcttggtgcaccaaagtatagtgccgattgtctttgaaatatttgatgtggatgaaagagtccgtctattttttcttccgcgctaccttcctcatattgcccgcattcctgtaagtatcattttcgctgtactaggtatagtgtttttgtataaagccatattaattaagaaacagcacgtaaaagaatcacaactaataaaagatgatatgtaaaacattaccaatcggtcaagtttttagcggatgttgttcaactatagttacgtagttaaacaacattcgctttacatatttattaaagaataattattttcaagttttaacctataaagatttattatccgtacttgttcctccgttaattcttctttatcccaatacatatgcattaagctatattcaaaaatctcctttaatttaataaataatggaaacttgtctatcatctcttttggtagttcattttcctcttggtagccttcaaatagtgcttttgtaatagaatgttcatagtcaatgatattcccatttccagcaaatgaatattctatcgcactataaataggaacggctaaattgaatatgtaaaaatatttttggaatgaatccaagagaataccaacgaacaacatgcctattcaatcatttgttaaactcaatataaataaagaaggggagttcaaaatgaatatttctagaaaattagaggttgaacagttacgtaataagaatagtgagctatttgataaagatgtacttaacatattgaatggtcaaatgatgtatgaagaatttaaaacggaggagctaatgggtgagtctgattatgccccatttaacgaggccatgtgtgtaaatagcgttactgcacaagtttttgatgaagagtttattaaaataagagcagaaggtcataacagttcagtcgaaaattatgcaaaaaaagttatagatccgttagaaaatctatttgcgaaaaagtataaatgtattgttttatggttcggtgaagatatgttttgccaaatgaatctacttactttactttcataccttgagcagtcgtgctatgaagggaaagtatacttaaatagtttcagggaggatgaatttaaagtaaatcaaattgaacttgaattgggggattattctactatatacaatgaagtattagtaaaccataaaaagacttatcataaagtaccacctgtaatgtatcaagctatagatttatatttagaaatgctaaaagaagataatatcgtaatgaaattcatctctaaaaataaaggtttatcaaatcaagaattattaacaaagttgttttatctttttccaacaatcggatatggtgatactcagtacatagaactgattaataaaatgaagaagaaaactacacctaaaatataggtgtagttttcttcttataattgctcaagtaattctaattctttttctacaaatagcattagttctttaatggtttcaccagagaaatcaaaacgaataccggctgcatcatatacttcttttatagattgcgagcttcctagtgataatgcctttttataattttctagtgtttgcttaggatcctctttatattgtttatacatttgtaatgccccaagttgggcaatcgcgtattcaatataataaaatggtacttcaaaaatatggagtacaggtaaccaactcgttgctatccagttttcgtagccatcaatatgtatgacgctagattgataatgtttttgaagttgtaagtatttttcatttctttcttcagaagtatgaattggattttcatacagccagtgttgaaattgatctacaataagcataataggtaaatatgaaataacatctttaaagaagttaatttttgcttgttttaaatcttttttgtctgtatagaaggtatcccaataattaagcgagaataactccattgtcatactggctagttcagctgtttcagctggaatttctatatactgtcgtaattctaatggctttatgagttcgttatgaatactatgacccatttcatgtataaaagtgataatatcatcttgtgtataatttaagttcataaaaatataagataattgtgaagctggtaagtactcacaaaagccaccagctgcttttcctttgcggcttgttaaatcaagacaattgtgtttatacattcggtttaaaagtgctgaaaattcaacatctagtttattaaagatatgagtgctcttttcaattaaatcattttcatttgcaataggtttaagtactttttgatctggagttacagctgatacatcccaagggcgaagtgtatctacttgcagtttttcttttttctctagcattattttatctttaagaggcacaacatacttacgtatggattcggctagttcatagcaatctatcgctgaataatcaaaacgctcgtattttttgaacatataatcgcgataattctctagttgaatattttttgctttttgatggcgaatttcaattaattgatttaatatgttttggagttctttttcaacagataaaaattgttcagaaataatagtttttgcctttttacggatgtcacgattcgaatcttgtaaataggattgtaattctgttatcgttttttcttctccgtcccaaatggcacttaatcctccagtgatttcaaagtactctgtgactaatttgtcttcctgtatttctaattcaatattttcctcacaaaataacttttgagcattttttatttttgtatctaataaaccatatacgttagaatctaattccattcgaaaaggtgactctaaatatttattatccaataaattttggtaccgctttaaaagtggctttacaaattgttgatcatgttcaaatgtatcctttatttcttcatcatccgtattacattgaaaggcgatgtaatgtaatcttaattgttcttcgatttcccaaattacttttgactgctcttttaaccaattttcaaggtctagttttgaagaaatcatcttatttaataaagtcgaaagagttttttccaattgtagtacattactaatatcaatcgtatttacacgttgcattatatatccctcactttttatttattcatagagatattctatttattaattgtaattcccttgttaagtggggaaaatgtgaaataatgttaaatttaataattatagaaggtatttatatgtcaaagtaaaaagtttatcgtaaatgaaaatgtgtggaggggtgctacatgagaaagggaacaaaggtacttgtatttttaattccatttgctttattatgtgcctgtgagaatgagattgaagatgctaaaagtgaagattctatagtgatggatattgctacagcagcggtaaaggaggaatctttttttagtgctgctatatgggatgaaaaagcaagaatagtagatttagaaattgctgatagcgaaaatgctaacgaaataaaaaagaaattaataaaagattgcaaattcaaggtattatgtcctataaagtaaatatatctcaaagaaacaaggagattgtaaatgcagaacatagatgggagttagtttttggacagatatttgatgacgtattcaggaagaatggatatgaagggtttgggattcagcaaataaattataaaaagaatcaacctgttaccattgatataaaaactaagattagcgatgatgaagtaggggcgagagaacttggacagaaaatagaaaaagaagttgaaggggtacttaaaacagaagcagtaaagaaatggattgaaaatgattcatacgctattgggatttacgatatagatgatcggaaaattaactaattgaggaatgaatgctatatgaatataaaatcgatataattaaatagaaaattgctgaaggaggtgtaatatgtataagtatttacatattttaaacgacatagaaaatatgattcaaaatggagaaataaatgaaggaaagaaattaccgtctatacggtcactcgttacgcaatatgaatgtaataaggcgacagttatacgtgcgcttcatgaattagaaaagcgtcatattatatattctgtccctcaaagtggatattacgttgttaagaaatctgggagtaccatagaaaataacgagataattgattttgcttcctcagcaccagatccagatgttttcccatatttagattttcaacattgtattaataaggctattgatacgtataaaaatgatttgtttgtatatggaacgccgaaagggttaccatctttaataccagttattcaaaaacaactagcaaattatcaagtctttacaaaagaagaaaatatttttataacgtcaggtgttcagcaggcacttgctatattaacttctataccatttccgaatggaaatgaaactgtattaattgaacaaccaacatatcatctatatattgattatctagaaataaataaagttcctgtaatcggtattaaacgtacgaatgaaggtatcgatttgaatgaattggagcaaatatttcaaaccggaaaaataaaattcttctatacgataccgagatatcatcatccgcttggaacgtcttattctaaagatgagaaagaaaaaatcacactattggctaagaaatacaatgtatttatagtggaagatgattatttagcagatttagaaactgattcaaaagcagatccgttatatagcttggataattgtagtcatgtcatatatttgaaaagttattcgaagattatttttccaggtttacgggttggagttgcggtcatcccacgatccattgcaaatgctttctatacatacaaaaaaatactagatattgatagtccgatgatttctcaagcggctttagaaatttatataaagagtggtatgtttgaacgtcataaaagtaaaattaattcttcctactacaatagatcaataaaactagcagaaacattagaaaaagtgcaaaataaaaattcatcattatttacatataatagacaaaacacacttggaatacacacttgtttagaaatgcagaaaaacatagttacagaaacacttatacaaaaattaggtgacattcaaataagtgtcgatactattgataagaattatatgagggattttcctaaagaaaaactattaaaattaaatgtttcgaatgtaaaagaagataagattgaagaaggtattcgtaaagtaattgaggaaatcaagcaatcaagacagttggattttcagtttagaaagtaataatttgaattaggaggtttgttgtgagattgttttacaattagttactccagatggagaagcctatatgaggaaatatgataggaagcatataccagaggttataaagctgaataaaatgaaacgattacggagaaaagtagcagttgtggccggagcaactatatatgtaactgaataactatatgttttttaagagcactcttagcaaaaagtgctctttttcattaatgtaaatatttacttagcatctttttaaaatgatttttatcataatttacatattgcgtagctgtatttcgtattgaatctcccgcgtaaaatctttcgtataattcgtgtcttgatcctaatgggcttccaataatatcccaggctaacttaaataattttgtgcgttgttcggcatctatatttgttcctttaaagtgctttttcaataaatcatctattggactctggaagtcattcgagctcgaaggaagttgaatgaaaccacctgctccaattaattgtaaaatttctattgcacggggataatatttggaaccaagattccttgcagtttcgatatatttaaattttggcaaataagtttttgtttcatttgtagtaccttcaacttctgcagcaattaaaagtgcgcgaattgtttcgatttgcataattaattccccaagcttctcttgaacatgcaaataagtagtagcaccgattgcttcagcaatttcacaagcaattgcagttataaattctagctttactactaatcgtacaattgcttggtgataagctaaactactagaagctatatctgactttattgcccataacgcttcagggttgttatatagtaagacacgttcccatggtacaaatacattatcaaagattaatagtgcatccatttcatcgtactgtgagctaagaggggaatcaactgtaattgaatgtgtattcgcaaatggttctctacaaaccatatgtaatccaggagaattggctgccacaatgagaaagtgagctaaatctttttgagtatcagtcagttttgctaatggatagattaataaatcatgtgaataaggagaagcagtaccgatcattttagcaccacttaaataaattccgtcagaagttttcttcgtaactcttagtaatcctaagtcatttgtattcaacattgattctgtagatcgatttatttgtggatcacgttgaactacgcttaagaacaagtgattatctctcgcttcttcataataagatgtaattttatctggaaactgtacatcgaattttttataaaaatattttgatacgtaccagccggtaagtctcgatcttgcgtaatcagatagtctactcattacaccgtctgtagcataactccacgtttcaaaagcggttctcctcattaataattcgttataggaattcggaattaaaaaggccgtatggacaaattctttcgtttttgggctaacatatccaatagaatctcttcgtattggatcatcaaacaatgaaaataaattagaaatggtacttaatgttcctgcaaaatgtttgtctgtagttacatctactttttgtccatagagccaaacgttacgaccatcttgtaagctctttatatagtaatctttcaaattttgcatatttcctccttctaaagactattcatatatttggacatcttttaatgggggggaatatacgtggaaagttattactgccgaatctgtagcattatacattttatgcacagtatctttttttactgtgaaaatatttccctctgtaaactcttcaatccgctcgctattattttcgtacgttatattttgtagcgtaccattgactattagtatacatcctacagatattccgtgatcgtgcacaaaagtctttgctttgctggggaaatttaatactaaaatctctacaaattcagactgatagataacgttccgtccgtattcaagattaactggtgaagtaataaaaggagatattttatgaagtgaaatatttaatgattgaatagcgtgtattaaattgaccgtatcgtagttacataggttattaaacgttttttgtatgttatgaatcaattgcatgtaaaacttcctcctaagcatgtacagtaaaagaaaacctaatctaatattatatagagcgtattgaattacataatattgtattgaaacatttccaaaaagttacttcttttacttaggaagttcatttaatttgaaaattccggtaattagttccgttaaaatgatatgcttgaactatatattttttatcccgttaaatcccgactggtgagggctgataatcagtggaggatgaacaacccccccactgattaaagtttcactttattggaaaggtgatgaaataaatggcagttcttttagtggaaaatctatatcaaatgtctattgttttactgattttatgttcattttgtttttatagatatttaaagaaaataaaaaaggtaagaaagcttacaggttttgaaattacgatgtatatcgttacgcaacttgcgtatttcatttgggcggcaacaacttttcttaaaatgttatcagaataataatgctgttaaacaatagtgaaatagaataggttatctatatttttctaataaagaaaaaagggggagtatttacaacttctacatttaaaagattggtttttaagtgttctgattttgaatattaagtttccttctttttaattagaaattatgagcatcttctgattttaaagacatcgattatatttggatgagattacacattcttaatctcttatattgtctctaccccatgcccatcaacttaagaatttgcactacccccaagtgtcaaaaaacgttattccttcttgatgttgcctaacttttttcaaaatgtcctttacaaagggtacagattaataagagcgcctcttttttatttttcacgtttttctttaattgctactgtacatcttgatatacatagtaaatcatcattttcatcaataatgcgaacatcccaaaccattgtcgattgtcctctatgtattggtgttccaatcgctgttacaattccatctttctttgagcgaatgtggttcgcattaatttctaatccgaaacaaatacatttttcttgatcaattaaattatatgaaccaacacttgccactgtttctgctaatgcaaccgatgcaccaccatgtaaaaatccaaatggctgatgcgtacgctcatcaacaggcatcgtagcaaccaccttatcttctgtcatctctaacaactcaattccaagtgaatccattaaagtttttgccatatcgcttcccccttctcttactttaattaaatgtataattttacctatttattttcaaactacttataacacttatataaggaggcttcacctaaatgaaacagaaattttgtatattactgcttatgttctccttgctgactattgtaccaaattgtgcaataacagccaaagcatctaacctgacaatcgatgttaagactgtaacgcaaaaaggtaagaaaccttatatagaatatcaaataaacaggccttattttcacgaattttctgactctaaatttcaaaataaactcaatttatactacaaaaaatccactgacaaatttaaaaccaaattagaaaaagaagcaaaaaaatattataaagagacagaaggatctagtacaccatttcatccgtacgtagcaaatgttgattataaagtctctttaaacaaaccaccttttcttagcctatatgtgaattactatcaatatactggtggagcacacggtctttatacgtggaaggcaaatacattcgatttaaacgaaaaaaaggtactgcacttagacgatttatttcaacaaaaggataaatataaagatgtaatccgtgcggagattgtacgacaaattaaacaaaatgaaagcatttattttcctgatgcaactgaaaaagtaatgagtatgaaaaaattccacttctttttagagccagacaatctcgtcatttatttccctttatatgagattgctccctattcaagtggaattccgcaatttcgtattccatatacgttgctaagagactatttaaagccttcttatcaaaatattttgattgacaacaagtaaatattttcgctacgataatgttaacctaaaaacaacaggaggttaacattatgagaagatttcatgttttagatttagcattagctgccatgttcgttgctcttatggcaatcggtgcaaatattgtatcttgggcaccattccttcaagtagcaggcatcccattatctatgcaaccatttttcgcaattttagcaggtcttcttcttggaagtagacttggtgccttatccatgactgtatatatgctcgttggcgtagccggcgcaccaatcttcgctaacttcaaagctggatttggagcacttttagatcctactggtggttttattatcgcatttattatcgttgcttacgtatccggaaaactagtagaacaaaaagaaagaccaacattcattacatttgcaattgcctctttcacaggaattattttaacttatataatcggtactacttacatgtacggggcagtcaatctctttatgggcggtaatatgagctataaagctgcttggatgattatgatgtggtttgcagtaaaagatattgcatttacaattatcggtgctattatcgcacctcgcatatattatgctgtgcgtcgttctgcttatcagcattctcattcgacgatttcataataaaaaaatgagttatttcagtatactgaaataactcattttttattatgactcttgattcgcttgttcttctaaaattttcttcatcattgcaaccatgtcatcacgtaattctgggtgttgcagggccatttcaattgtcgtttgaacgaatcctagcttttcacctacgtcgtagcgctttccttcgaaatcgtaggcaaatacacgttggatttcatttaagctttggattgcatctgttaactgaatttcaccaccagcaccgacatgttgctgttctaagaacataaagatttcaggcgttaaaatgtagcgccccataatcgctaagtttgaaggagctgtaccttgtgctggtttttcaacgaaattgcgaacttggtaacgacgaccttcttgttctaatggatcgataattccatagcgatgtgtttccgactccggaacagtttgtacaccaataacagaagaaagtgttttttcatactcatccattaattgacgtaaacacggtttctcagcttggacaatatcatcacctagtaacactgcaaatggctcatcaccaatgaatttacgtgcacaccaaacagcatgtcctagtcccttcggctctttttgacggatgtaatgaatatctaccatttttgaagaagcttgtactttttcaagcaactcatattttttcttctctaataagttttgttctagttcaaatgcgttatcaaaatgatcttcgatagagcgctttgttttaccagtaacaataataatatcttcgattcccgatttcactgcttcttctacaatgtattgaatcgttggtttatctactatcggtaacatttctttcggcattgctttcgttgctggtaaaaaacgtgttcctaatccagctgctgggattatcgcttttcttacttttttcatcacaaaataccctctctcctgtcggaatcaatagcaagcatttcctacataaaacaaaagggagatttcgctcccttttgttccttactacttaaaattactttgtattataaacgattcataatgtcttctttaatagtaagtaacttttgttcactattttgtaaagaactatcttttacaccaaagtaaaacttaatcttcggctcagttccagatgggcgtaggcagaaccatgaaccatcctctaattgatattttaacacatttgatttcggtaagtgaatctcttctttatgtccatcttgtaaagatgtaacgatgcttgctttatagtcttccactgctacgactgttaagcccgctacttctttcggcggattctcacggaacgttgccatcatctcttggattttttccgctccatcttttccttttaacgttaacgatacaaggtcttcacggaagaagccgtatttctcaaatacttctaatagaccgtcatataacgttttcccttgtgatttgtagtatgcagctacttcacatgcaaatagaacagattgtactgcatctttatcacggcagaatgggcggattaaataaccatagctttcctcataaccgaattggaattcatattgtccgctttcttcatactgtctaattttctcaccgataaatttaaatccagttaacgtatcaactgtatctaaaccgtatgcttttgcaattgtacgaccaatttcagacgttacgattgtttttaatacgacaccgttctctggaagcgttccgttttctttcttttgagatagtaagtaatcaagcattaatgcacctgtttggtttccggttaatacttggaactcaccattatgattacgcactgctacaccaagacggtctgcgtcaggatcagttgcgattaatacatctgcgcctaccttttcaccgtcacgaattgcatactcaaacgctgcgtgctcctctgggttcggtgattttactgtagagaagtttggatctggtaactcttgttcttttacaactgttacatctgtaaatccaacttcttttaaaccacggcgtacagaaatatttgatgttccgtgtaatggtgtaaagacgatttttaagtctttaccaaccttttgtaccatttctttattaatgatgacattgttcaattctgcagcatatgcatcatctacttcttgtccaataatatgtaataaaccgtcagcttttaattgctctacatcagcgacttcaactgttaattcatcttctactgcatttacgtagctaattaactcatctgcttcttttggaggtaactgtccaccatcttcaccgtatactttgtatccgttatattcaggtggattatggcttgccgtaagaacgattccacttactgtatgtaaatgacgaactgcgaaagaaagtactggcgttggacgtaagctttcaaacacatatgttgtgataccgcgtgcaccaagtgtagcagcaacttccattgcaaactcaggtgatttatgacgagaatcataggctacaacaacaccgcgttttttcgcttcctcacctaacttttcgataaagcttgctaatccttttgttgctttacgaactgtatatacatttaaacggttcgtaccagcaccaagttcaccacgcataccacctgtgccaaactctagatttttataaaagctatcctcgattttcttctcatcttgcttcatattttctagctgttcttttaattctgcatctaattgtgcgtaagaaagccagcgactaaattcttgtttccaattcattcttctctctcctctcgctcgtcatacctttattatatgaaaaaaacatgctgtatctcaatattttataaaatctaacaggattttactaggaatatttgtatacactattgttaaatactccactaaagggaatgaggattatgcacgaatggggcttgtcagaagagctcaaaatacaaacaaagcaaatgattgaaattgctgaaaaagaactatcgattatgaggaacgcaatcgataaagaagacgaatgtattttatgcaaaatggaagatattcatcatatgttagcaaatgtacaaacattggcagctacatactatattcaggcatatttatcaccttatacggaaagttcatcttttattacgacagctatccaacatttaagcgccagaaaacatggtgctcttatcgtcgtggaacgaaacgagacgcttgaagctctcattcaaactggaacgacattaaacgctcatttaactgcgccattactcgaatcaatattttatccaggtaaccctcttcatgacggtgccgttctcgtaaaaaataatcatattgtctcagctgctaatattcttcctttaacgaaaagtacagaagttgatcctgagctaggaacacgtcacagagctgcaattggcttatctgaaaagagtgatgcacttatattagttgtctctgaagaaacgggccgtacttcttttgctttaaatggggttttgtatacgatttctttataaagtgaaactttaatcagccctcaccaatcgagcgtttaccggcaatccgacctaactgctttcctttcgctgaattttgagttatgggtcttactacccggcaaatagtgggataaacaaacctataaaaaagaagactgttccaaaatatcggaacagtcttcacttatactcttattcttctccaaaacgctccacaagtgttgcaagtgtacgtaccattgcgccagttgctccagctggacctaagtcgtgcgcaccttttgtttctgatgttccagcgatatctaagtgtacccatggtgtatcttcagcgaattcgcctaagaatgtacctgccataaccgcatgtccttcacggcctggtgagttatttaaatcagcaaacttactgtttctcacacgttctttatcacgatcaaaaatcggtagttgccaaattggctcatctgtttccatagaagcctctagcacttgctcaaataactcttcattatttgtcattgcgcctgtcgtatagtttccaagtgcaacaattacaccgcctgttaatgttgcaacatcaacaaggtagtttgcaccaagttttttcgcatacgtaataccgtcagctaaagctagacgaccttctgcatccgtatttaatacttcaattgtttttccgctcatagatgtgattacatcgtctggcttaaatgccgtaccacttacaacgttatcagttgaaggaataacagcgatcacattttgttctgggcgaagttcaccgataatttccatcgcacctaatacagcagctgcaccgcccatatcacctttcataccaaccatgccttcacgtggttttaaagaataaccaccagtatcgtatgtaataccttttccaacgaacccaatgacatctgtccactcttcttttcctttataaataagagcaatcatttttggtggctctacactaccttggtttactgcaagtaacgcacccataccaaggtcttccatctcttctttctcaagaactttatagtccatatcatatttctccgctaattcaacagcatactcagcaagctttgtcgctgttaatacgtttggcggcatatttacaagtgtacgagctgaatttgttgcacgtccatgtacgtagccaactgttaatgctgcttcaatttcttgtgcatcttccgctgtaatagccgtgaacttctctaactctacacgatcctttttatctgatttatacgtttgtaactcatatgtaccaaggccttgtacctctgccgcaatatgagcgacatcaatcgcgtctaatttctctgttacgaaagaatcaagtaagattgctgcatctcgtacttttgctgcttgcagtgttttaaacgccttaccaagagccgcacgtaacgtttctgtcgtgtaagattctttctttcctaaaccaacaaagtaataacgtttcacatttattttccctaagctatgtactttcgaaatggcctttttcttcgtagataattctttctcttctagtaaaacttgtaattgcccttcaaacgctttgtccagttcttgtacaaaactactcattttctcttcttcaaataaagcaacaattaccgcttcatgacctgctaattctttttgtacttgaaacatgttcagaccccctaaatttctctaccaccattataactttattttcgataaaatgcgataattctaactacagttatatggcgtgtaaaatcgcagatccaaaatctcctctatcatgaaataagccaagaaaaaaagtctagcgtaattacgactagactatctttgttttaaatattgaccacgaaacacttgcatcgtttcgtcttgatttaacatcgttaactcttcttctgtaaatttaccatttcctacttttactacgtacacatttacttttttcttaccccattggctataaacatctttcaccgtatcataatatagatcaagacggtttccttttattgcaccgcccttatcagctactacaccatacccgtaacctggcacgaagagaatcgttccaatcgggaatacgcgtaagtccgcagcaattgtggaatataaatcccttttcactttgacacctgaatatgtaataccatactctggatgccctggcctcttaccagttgactcaatccccgatgtataacctgttgcagtcatttcaattgaacgatatttagaccagtcgtttgcctgctctaaagcatttatcacttctttactcggagcaacatttctcttaacttctgctgcatgtacttcttttgcactcattccttcatatatctttacaatctctaataaagaaactcctgtgaaagcattccatgttacgcataatgcaattgcaagtaaacaagtcatcataatgcgaatacaatatcgttttaacatttttatattccacactccttcatcgttaatcattccctatacgatgaaggaatatgcaaaaaaataatctccaacttaattggagattaaaacatttgatatccgcttttccgaagtttcttgattacgactcctgctaaagcagcccctactaatccagtagatagaataaatacgtctgcttgtcctaagtgcgatacacttgtcccaaatgaagaaaatgtttctttcggttttgaaaaataatcccacatactcgctttattaataataagcatacaaacaatcggatacacaataaccattacccaagtagctcgcaaaatcatgttgagtaaaaatccaattccaaagaacaaaataaagaataacatcattgaaataagtagtaccggtatactcactcttttcccctctccttcgcacgtgccgtaaatacgtgataagctgtataaccaaatggttcacctggatttaatgttttgtccacttcaagatgtagttctgatcttccttctaacaaatatttaataagcacagacgtattcggatcgtctacaatcttatccggatgtaagaacgccacttcagacaattctttctcctgtacaataatattttctccttcaggttccaaaaggaaaataatcatattatcactaatctcattacgaataacacccgatcgaacaccaataatccccttcacatgagcgacaatgcctgtctcttctaacacttcgcgtttcacagcttcatcaaccgtctcaccttcatttacaaaaccagccggtaaagaccatttcccttttaatccactgtatttcttcttaacaaatagccacctaccatcttttgtagctactaaaccactaacagctagccataccttccctcgtttctccatgatgtaataacctcctccatcagaacggacagaatattctttcttttttatatattatactatatttttaatatgaaaaaagcagaaacagctcttagccgtttctgctttttctactatatattaaaagaactttaatttaccttttttaagaactaataaaggtccacctaataagaataggtaacggttatcgattactttcttcatgaaggaagctttccaacctgttaactttttacccataacaacgcccattgcatcgtcatgacctaaagaacatacagatcctttattatcgaatgcgaatttcttcatctcgcccttgccacgaactaatacagttaagttgtgtgcaatattgtaaccttgttgaattgcaatttgtgctgttggtgggtaaggacggttaatttcttcattaataattaacgctgcgtcaccaaccatgaatacatcttcgtatcctggagcgtgcatgtactcatcaacttttacacgtccgcgcattgcttcaaagccagactcttccacaataccattaccacgaacacctgcagcccaaactactgtttcagacttaattaattcagtgtcatcgccattcgcaacgataataccttcttcagttgcttctttaattgctgtaccgatgcggaattctacaccttttttctcaagctgttttacagcgtattctactaacgctggatcaaaacctggaagtgctgttggagcagcttctacacagatgatacgtgctttttcacgtggtacattatactctttgcaaagttcaggaacacggtttgcaagctcacctacgtactcgataccagtaaatccagcaccaccaacaacgattgttactaactcatcgcgttgttcagttgcatatttagagaaactagcttccatatgctcacgaatttcacgagttgcattaatgttagcgattgagaatgcatgctcttttaatcctgtaattccgaatgtttctgattcgaaaccaagaccaattactaagtaatcatactctaactcgccatcttttaagataatgcgtttttcagcagctttaatttctactactgtgtcttgtacaaagttcactttatttgtatcaataacgtcttgaatatctagacagattttttcatcttgtaatgtaccagctgcgctctcatgtaaccaagtcgcttggtagtgatagctgttgttgtttactagcgtaatttcagcttcatttacagataatgctttttgcagacgaacagtcgtaatcatcccgccataacctgcacctaaaactacgatttttggagtcttcaccaaatcacaacccttttctttatataatagtaataaaaaataataccaagtactaaaaactctatttgtcaagaatgtggaatttatcacattctatatcataacaaaacgcagtcaaaaaatcgtacgaattttgtcatagaaatttaacataatacttccctatattagtcggttttattccagaattcaagcgtctggagaattatcaatattttaaaataacatagcgttttcaagggttttttagcctttttttcatgtattttcctttctgtatattttatacaataaaaaagaacctatgcgaaaacttacacacaattcagtcgttttcagaagtattatgaactcaaatatgctatcatttatttgaaagtgtcatcatttgcaggattttcgtgtacatatgaacaatatatgaaatcaatatcaaaattccatctatagggggaatgaaagtggcagaaaatcaaaaagtttacgacataacaattattggtggtggtccaacgggactgttcacagcattttatggcggtatgagacaagcaagtgtaaaaatcattgaaagcttacctcaacttggcggacaattatccgcactctaccctgaaaaatacatttatgatgtggctggatttccaaaagtgcgcgcacaagaattagttgataacttaaaagagcaaatgaagaaatttgacccaactgtttgtttagaagaagctgtcgatacgcttgagaaacaagctgacggtatatttaaacttgttacgaataagcaaactcactattctaaatcagttattattactgctggcaatggtgctttccaaccacgccgcttagaattagaaggtacagcgaaatacgaaaagaaaaacttacattatttcgttgatgatatgaataaatttgctggtaagcgcgtcgtagtatttggcggtggcgactcagcagtagactggacaatgatgttagaaccgattgctgaaaaagttacaatcgttcatcgtcgtgataaattccgtgcgcatgaacatagcgtagaaagcttaatgaattctcgtgcagaagtaagtacaccatacgttccagtagaactcattggtgatgacaagattgaacaagtcgttcttcaacatgtaaaaacggaggaaaaaattatcatcgatgttgatgacgtaatcgtaaactacggcttcgtttcttctcttggcccaattaaaaactggggcttagatatacaaaaaaacagcatccttgtaaattcaaaaatggaaacaaatattcctggcatttacgctgctggtgacatttgtacatatgaaggaaaagtaaaacttatcgcttgtggatttggcgaagcaccgacagcagtaaacaatgcaaaagcttacttcgatccaaatgcaaaacttcaaccgatgcatagctcaagtatgttttaatatgcaaaaataaagctccttccatacgtggaaggagctttccttttatataacataaaagcacactgagtccaataaactatcgaactcagtgtgcttttcgtctaaaaaattattgttttcttcttctacctaatacgaataatactccgccaactaagaatgaaattcccgcaccaactgacatcatccatgaatgtgctccccctgttttcggtaattctttttctacttttacttgcggttctttaattaacttttccagtcttacttccggtttctccggtttcacttctggtttcttcagatctttcggttcctccggtttcacttctggttccttcggctctttcggatcttctggcttcacttctggttcttttggttctttcggttcctccggtttcacttctggttccttcggctctttcggatcctccggtttcacttctggttccttcggttctttcggcccttctggcttcacttctggttctttcggttctttcggttctttcggttctttcggttctttcggctcttccggcttcacttctggttccttcggttctttcggctcttccggcttcacttctggttccttcggctcttctggtatcttaagatcttcttttgttttcggtaaaattgtaactgtaggctcaagtggtggatttattttatcgtccactaccgctctatttgttatccctttacttggtgctgcttttaccttcactttaaaaataatactacgttctttcgtatctgtaatttctagatactttgctattacttttccaaactccatttttaactctattggatttggttcagccccttcaaatctaatgctatcttgcacgtactctaaaccggctggaatttcatcttctacctttacctctgctagtttgccgttttctaccgtatttttgaaactaattcggtattctacttcttctcctagcttcggttctttattatttactgtcttcgtcgcttttaacttaccatctttatattctggctttattgtcgctgtcggttccataactggatgatctggatcatctacatgaatgatcgctttatttgttatttcctctccaacttttaccgattcttttacctttactttaaagatgatacttctttctttcgtatccgtaatttctggatacttcactgttacttttccattctcgactttaagttctgttggcacaggcttatcacctacggcctccagactttctttcacatactctaaaccagacggaatttcatcttcaatctttacatcaactaacttcccgccatctactgtgccgttaaaagtaattcgatattcgatttcttcccctagctttggttcatggttacttacttctttccttgcctctagtttcccatctttatattgaggtgtaattggtataagtgactcaactggtggatttgtcggattattatcatccacaaccgccttgtttataatttcttttcctacttgtaccgtttcttgtactttcactttaaagatgatacttctttttttcgtatccgtaatttctggatactttgctgttacttttccattctcaactttaagttctactggatttggttccggcccatcagactttatactatcctgtacgtattctaaaccagctggaatttcgtcctctacttttacctcagttagtttgccgttttctactgtattttcaaaactaattcgatattctacttcttctcctaacttcggttcatggttactcactgtcttttcagcttgtaatacaccctctttatgttgaggttgtatcgcgacattcggtttctctggtggatttatagtatcttccacaaccgccgtattcacaatcgcttcgccaattttagctttttctttcacttttgctttaaagacgatacttctttctttcgtatccgtaatttctggatattctgcgagtactatgccgtttttcacttttacatgcaacggttttggattatccccctcagctcttccgctaccttctacaaactctaaactgtttggtaattcatccttaattttcaccttcgctaattttccgtgctcaactacgttacggaacgtaattcgatactctacttcttctcctaattttggagctgggttatttactgttttctcagcttttatttttccattcttatactccggtgtaataatcgcttctggtttttgcggaggattcttcggattatcatcatccacaattgccgtattcacgattttcttcccgacttttactgcttctgttacttttaccttaaagataatgctacgctcagctgtatcagtaatattttcatacttcgctgtaatttttccagcttcttcttttaactctaccggatttgattcattaccttctgcttttaaactatccttcacatactctaatccatttggtagttgatcctcaattttcacttctgctagttttccgttttctaccgtatttttaaaactaattcggtactctacttcttctcctagctttggatcttttttacttacctttttattagctttaaatttaccagctttatgctgcggtgtaatatctacttctggtcgctctggtggattttttgtatcatcaacaattgctttatttacaattgccttgtccacttcaacggaatctttcaccttcactttaaagataatgcttctttctttcatgtcagtgatattttcatacttcgcactaaccttaccagcttcttctttcaactctactggggccggcttatcaccttctgcttttagactatctttcacatactctaaaccaaacggaatttcatcctcaattttaacctctgccagttttccatctttcaccgtattattaaatgaaattcgatattcgatttcttcacctagcttcggtttatgattattcacctttttatgagcagcaattttaccatctttatattgtggtgtaatttttgctgtcggatcaattactggatggttcggatcatcaacatggataatcgctttatttgtaatgtccttccctattgtaaccgaatcttttaccttcactttaaagacaatacttctttcttgcgtatccataatctctgaatactttgccattaccttaccattttctactttcaactccactggttttggctcttcaccttcagctttttcgcttccttctacaaactctaatccagctggaattttatcttctatttttacctctgctagttttccatctttcaccgtattattaaaaataattcgatattcgatttcctcacctaacttcggttcatggttacttacttcttttcttgcctcaattttcccatctttatattgtggtgtaatcggtacataaggctcttctggcagattctttgtatcatctacaattgcctcatttacgatttcttctcccacttttacgctttcttttaccttcgctttaaagacaatgcttctttcctctgtatctgtaatttctggatactttgccattaccttattatttttcacatgtagctctactggtttcggtttagaaccttctgccgtgatactgccctccacatactctaaaccatttggtaatgcatcctttatatttacctctgctagttttccgttttctaccgtgtttttaaaactaattcggtattctacttcttctcctagtttcggtttatgattattcgccactttctgcgcagcaattttaccatctttatattgcggagtaatttccacatgaggctcttcgggctcattttttgtatctactacgattgctttattaacaatctccttgcctacttctgcctcttcttttactctcactttaaagataatacttctttcttttgtatccgtaatttctagatactttgccattaccttgccgttttcaaatttcaattctaccggacttggtttagaaccttctgcttgtaaactgttctccacgtactctaatccagctggaatttcatcttctactgtaacctctactagttttccgttttctaccgtgtttttaaaactaattcggtattctacttcttctcctaatatgtaggaacaaagcatcattctatagagttaggatcagatagtttaatagagtatttattaactccaatgcgagcgcgtgatctacctggagttggagaactagaaacgtctctttatttgctatttaaggaaatgaagaaagacgcaacagttgccctttcaggcgaatccgcagatgaagtattctcagggtatccatggttccatcaagagaagtttctagatgcagagatattcccttggagtgttaatttatggtatagtacagaaattttatcagaggattttaaagcgaagattagccctgaaaaatatcaaaaacaaaaatttgaagatgcagttgctgaggttccctttttagaaggtgaaagtgatctgcaaatgaagcaacgtcaaatgtcttacatgtttattacacgtttcttgccatttatgctagaacgaaaagatcgcacaagtatgatgaatggctttgaagtacgagttccattttgcgattaccgacttgtagaatacctatggaatgtcccattcgaaatgaaaagcatagacaatattgaaaaaggtattttacgtagagcttttgaaaatgtacttccagaagatgtacgttatcgcaaaaaaagtgcatatccaagcactaaggatgcctcttatctacaaggtattagtgattggatgttacatgtgttgaacaatcctgaatcacctattttgccattaattaatgtagaaagagttcgtgctattgcagaaggaaacgacgaagtaatttcaggtaatgatgcaagaggtataatagattatttacttcaagttaatagttggcttcaggaatataatattaaattagtatggtagatgtaattttcaaataaagagaatagctgaaacattaatgacctaagtaaaccgcatttccaatggattagatagttatctaacaattggaaatgcggttttataaaaaataataatatgtttataaatgtaaaacctacggaaacttttcctgtgggttttttaagtagtttttacgaaattatgagtgttttttattttgtatttcaataagttcatcttgtaccatttttatataatattctttttctgttagttcaaatataaataatgcttttttccagttataaacaacatcttctacattgtgttgtttaatctttaataaacactgaccttttaaatagaatagttcacctaataggtataaagtatttagattaattgctaatttgatgcccctatcaatgtattttattgcctcttcatgttgatatatgaagtctaaacattttgctaaattgaaaatgatttttaatttaatttctttatctctaggaagatctaacttattaaaattagttaaacatctttttaatatcttaatacttttttcatattctttgttttctccatgaaatatagccattgtctgcataatatgtatttctctttctgataaaaaatcagaattggttaaagttagttttaatgcatgatttaaaagagttaaagcagtttttgttgatctatttacctcaaatatagcgatcgcttcatgccatattagaaattgtttctcttcttttgtttgaaaattatttaagtttttctctttttttactatttcataaagttctttatattgtttttgctttaagcaatcttttattacatattttacattttctgtatattttaatcttttgttttgagttagtgcaaatatatgattcggatcaatgccaagtctttctgataattgatataacaatatgctagatggataaatcacacctttttcgatcttgctaatttgactttgtgaacaaattccatgacacaattcggattgtgatatgtttttttttattctaagttctttaatggtaatacccaaatcgttaaattccattttttcacctactatttagcactgtattagtataagagctttctctaacttttaatgtaatgtaaaattaatatatttacaattattatttgttttaaaggaattaccgtttccataggatggtgaggcttttattatgtacaaaaaaagacaccctaaggtgccttcctccgacttgaaccacgttcatttagtataaacttatccgtattatccctttgttatacgtgtaaacacaccctataaaacagaatcgtctatatacaccagattgttagtttacaaagtacaagagatttgagatcagtattagagtgacgcgacaccttccataatgattggtatgttacgcctttcaaaagaatctgctttatagaatgtatccacgtttattattttactatatataaaattcattcggtgtattttttccagatatgtataattgcataaagttgatgggaaaatcagagtataatttggattgtgtaataaagataaggcccacctacggaaataggtgggtttttgttgggtattactatctcattgcacacaagggaatttctattaaaatcatagcatatttttatagttcttatattgagaaataaagaaaagacacccaaataagagtgtcttttcccatagttttttagcagaagcaactgcatccgataatgattaaaagtataaagagtacaacgagtaaagcaaaaacgtactattctacattatctgaattaaaggtagctacgaaaaatagaagtattcctgaccttgtaaagaaaggtattgtagatcgagaaggaaatggatttactccaggtgatgatgatacattttatgtaatgttcacattcgtagatagcggtgaagaccaaaatgtatttcagggagatgcattgaaattaaattgaacgtttaattccatgcaagcaagcggtgaagaaaagtaagtgtaataaatttgtatactctatgtttaaaattgtaacaagaagcataagatggccgttttgatcaacttattcctttttagtttgcggccaacgtatgctttcgactccgttgaataattaggtaatcatctacaaaaacgtatagtatacaattaaaagaactgttttaaaattgaggagtttatcgtgaatggtaaatattctcataaatatatgggcgagaaaactgatgacgatttccttttttttaatacatcgtaaaatatattttacgatgtatattgttgtatgttggagagtataggaatattaaataattatcctgcttttgagatatcttgaggggattttactcgtaatgtggaagaaaaacagttttggaaggtgctcaattatataccatattcattggtaagagagagaaaagaagtaaagaatcatgaatgaaaagggggggatatactatattacgacaaatgaagcctttgtatatgtgaagtagaaaaagtaaaagattacctgtaaagggtggttgaaacttggtcttactatttatttttttaatctctttttagagttcaactatttgtactagctattctataggagtaaggtttaaagcacgaaaataaatttcggtattatatgtaatgagttcttcttttttatgaacagataaaccactttgtaggatagctgtaatattgaactactcaccacttaacgtcctaacggactgtttgaagtgggagattcctgcgaacaccgatgtatccatcagttatcttagcaggctctacccgcagtccctacggtgagaacataagtatcttgtacgctgactcaccacactccctactttagcttggttttcgcgattttgagaagcgtggggcgatagaacgttgaagattttacggttgcaacgtttttctgcaaccaacctcatatcttcagttttcgaagagcaatctgtacaagtaaatgatagcaaatatgttggcttatgccaaccgacattcatctcccacctaaaattggcgtttcacaccttcacatttttgaggaaggagtcttctatcggaaaacgataaaactactattttataggaatacatttccgaatgatctattaccatcaatttaatatttttcaagtttcccaaaaactgaagtaattactaaagtctttataaggaaatagaaagctttttaaatcttgactaatatcttctagattcccatatatattatctgctgctaaattaatgtcctcattaaaattatatagctgttcatctacataactgaatccctcacagcaattattatgtatcaaattagatataaatggttttattttcaatacattttcttcatttaggataaatttatcccataacagccccagtattatttttacgggtaattttttatcatacgttccttttacgttttttaatttaggtacgatgtcaaccaacttatcattactagatagagaaacttctataatttcaatagaagggctatctaatgcttcaattgtctgatcagcccaatcaattatttcagtttttgaaaataaaccaatttgtaaccctatactcagaacctcagctattattttcatattatccatatataaaactccttagattttctggtaattatacatcgcagtaacctaaatttcaaaaggttgttgctagtatgcagtaactaaagggatttttaaacctaggatatctccacattgttagcaagataaaaaacaaaatctctcctaaaacgaaaaaaagatgaacaaaataataaaaaaggctcatttctatttcttttttagattccattccttagtaaaagaacttaatagatgaaaaggttagattgcacaattaattgggagatacgtacaagtaactttgaatctcttgaacaaatagttctaatttatcatatacagaaacagacataaaaaaaacatcctttcctatgattctacagaaagaatggcctgttttaatatttgtaggatagttttaaatacaaaaatatagaattgtgcaacttataaatgacttaatgtaaaatatatattgcatttatgttattaataatttaatatataaaatataagatttatggtatgaagttatgtttacaagtgaggtgtatttaatgtccgtaagtaaagtgaagtttgcaagggttgaaaaaggtctgacccaacaagggttggtcgatattgtaaatgttacacgacataacattagtattattgaaagtaataattataacccttctttaaacctttgcattcatacagctaaaacactagataaaagtttagataaattattttgggaggaattttaaaatggaaaaactaaaaaaatggttttcactcagtacacacccagatgaaagaattcaacaagtcgaaatgaaaatttgggctcaatctggaattattgtcctacttatagcttttgttgattttgtaataagaggagcatatctacaccgtccatttttagaatgggctgcttcattagccattataatttgttatatgatattcgtttttattaagtctattctaactggtgtctatgaaacggatattaataataaagaacaattaaaagaaaaattaaaagaaaaaatgaacaatacctttattttttgttttgtcgcaataggtgctaccacatacaaatataacttacctgaagatttcgttggatggttatcagtaatagcaagatttattatacttttcgctttcttatttggtattcaatatcttattacagtattagcatggaagaaatcaaataaaatttaataagtatagacaaaaaagcttatcttttagcacttaatgataagctttttattatttttttcatcttttttcgttttggtgtacaatgaatttcttagcttgatagcgatgggatagaaccacatcgccatcaagcggaaattttatagtaccccagaacaaaatttcgtgctaacttgtaacaaaaaaacatgtgaaattgcccatagataactatcttatattaattacataaactagtgtgtgatataataatataaagatattacatttaaagggggattcaaattggttaaaaacttacctttactaatagtgattttactacttggtataagttcttctacgttaagtacgaatggatacttttctccagttatagaagggtctttaatgattataagtattattttaaacattgctgcagtgataggtttatcactacacgttcttgtataccaacctatgaaaagatatgaaacaaatttaaaagagacatttaaataaaataattatattcgaggtaacaacccatcgttattgagctgaaaaatgtatccataaaaagaaaaaatacgctattctttctgtagaatcataggaaaggatggcgttttttattttagggagtattttgttctgttagcttgatggatgtgtggcggtaccctatcactatcgatttaaaagaatgactgccacgttttatgcaaatattaatttgttttgattgaaaatagattataaaattaatatttaaatataaagaatttgaatattagtatgttatcatttaaatgattcaaatatgtagtacaaagtcaatatttgtagctgagttcgtttatacatatgaaagaattaaattatgaaaaggcggtatttattatgaaagcaattaaattagcaggtttaacaattgcagcaggtttattattggcagcgtgtggtactgaagaagcgaaaatagagcaagacgttaagaaagaggaacaaaaagaaaaagttaaagcatttcaggcagaaaagcagcaagaagataggaaagtaactatgcaacaatcgacggataagtcaaaacagcatgaaaatgtagcaaaagaaacagttaaagaagaacaaaaagcggagtcaacgcctgttgaacaaccaaaagtcagcgggttaaatgaggcacaagcacaagaaaaagtggaacaatcgatgacagcacaaggccagggagcgcgtaataaagatgtgaaattaagccaattaggcatccaaacagcaaaggatggaataaaggtggctgcacaggcgcaagacgttcatattgaagcaaaagacagtctaactcgaattgttgttatcgttccagctggaacaacgaaagaaagagcgcaacaagtaggcaacatagcagcgcgccaagtggcaagttttggggctatgggattaaatgtagatttgaaagcaccatcaaaagactatttaggggaatattgggagaatttctctggtgatatcggtatctatgacagtaacgaaaaacaattagtacgtggatatatttccaagttaaatccaacaaaaattaaatggtaagaaaaacagagtccctacacaatgtatggggatttttccataaagaaaaaaacttaaggggtcttcggacgaatcgaattatcgtacagtaatgcatgttaattaataaaattaactatacaaataatttattatatatccatgtaatctagctgatataatatgtaagggaattattggttaattagtgatgtatatatgtaagattagggggatacataagtaaagttagatgctattttggcagttgtagaaatactcttcggtttttttgtatttataataactttatttgcttatcttttttcaacaggagaagaaaagcaacaagcaaaggaggatttaaaggagctttctaaaactgctctcatcccatttgtagtggttgtaatcgtaatattattttttgttgttaaggtgattgatcatgacaataaagttgaacaagaacaacaaaggctacatgaagagaactaccaatgttaccataatgatagtaattctaatcttgataaaaatctggaacaagatattaaataatatagataagaacctcgctatttctataagatggcgaggttcttacgcataaagaaaagacactctaaggtgccttttctaatagttttttagcagaagcaactgcatccgataatgattaatagtataaagagtacaacgagtagagcaaagcctccagcaaaaccgcagccctcgccgcaactaccaccatatcccataataatagttcctcctttagataagagaaaaagactagggggtcattccatgtgttttaatgggttcactttaccttatgtttttacgtatgaattgagcaggtccttttgaaaataagggagagatcatttaatgtgcttccccggaatattgattacctattttctaaaaaacaaactatttaattatatcaataataagatagattaatataatgtattaatcctaacagaagggaggattagccatgcaattagtttgttttaaattagtaaatggtcaatactttttagttgtagaaggtatcgaaattcctgcgccaattccagcgtttgctgcagctttattaattggtttaggagtaatcccactttgttcttaatttaaagaatttcaaacagctctatctttcaatcgataaccccttaagtatatgaatgcttgaggggtttttataataaaaaaagaaaagacgccataaggcgtccccacaattaggtagataagactttagttttccaatctaaagaaattttgtatcagttctttgaaaaaatatcataatatccaattgagttattatgcattattacattcttctctcaaaccttctagattctatttgataaaatagaatcctaatattactaaaaatcaaataaatgtttctaaaaaccctaaatatttataagggtaacaaaagtgatacatttaaggtgcaaattataaaaaatataaaaggagggtgaataaagcggtatttaaaaagggctattataaacggtgagcagttatacagtatatgaacctgaatcttgttaaaaaatgatactcatttgagtgtactttctgatttgaaccaacttgattaaaataatgaaaaatcatcatttgtttattctgatttctggaaaagttttaatagtttcatgctgaacaaacatactttttagaaagaggagagattattgatggataatcaattactatatcaacagcaaaaaagagaaaaggcacttgtgattggagctggtattgcaggcttacttactgcacgcgtgctttccagttattttgagacagtgatagttgttgaaaaagatgagttacctcaaaaaccatctgaacgtccaggtacaccccaagactttcatcctcatcgtgtattaccacgtggagaaataattatgaaccgtttctttcctggatatgttgatgatttattaaatttaggggcccataatgtcaagaatgataaaatgattcgattttctccgtatggggcactggaactagttatagaacgaaaaggtgcagcaagcagtcgagcattgttagaatggacaatccgccaacgtgtgcaagaaattcctaatgtacatttttattcaaagcaagcggtgacaggccttttagcttcgtctgatcacaagcgtgttattggaattcatattcaagaacgagacgaattaaaaacaaagcgaactgtgttaaccgatttggtagttgacacatgtggtcgtcaatctaaactcaataaatggcttacatctatgggctatgatgttccagaaccagaacgtttaaaggtgaattttggatatagcacgagatattataaagtaccttcacatatcaaagagaaattgagtgcaatttctgaaggagatcctgctaaaaacgttggagctgtagggttattatatattgaagataacatagctcaagcgctactatttgttgctggaggtatgcactatccaccaaccaattcaacagaatatgaaaaagaactggactcattagttacccctatgatgagggagttaattaaagagttagaaccaattagtgtcccaagaggatttagagcgcaggagtcaactcgtcaacattttgaacaaatggaaaattggccatctggattattagtgttaggtgatgctttttgtaactttgatcccatttatggacaggggatgaccgtagctgccattgaagctgaaatgttagatacttgtttaaaagaacattctactcataaacctggattcgaacgcaaggtgctgcaacgtatgcaacaagctattgagccggcatggtggctgagttcaattgcggatttacgttggaaaggtgttgaacatgtaggagctgttccactcaaaggtgtgaaatttgcacagaaatattttgctttatatcttaaacaagctgcaaagcaagcaaatgaaggtaattcatccatgctccaaaaatatataatgatgaatgggctagttcattcgcctcatgaaatcattaactcagatatgttaagaatgttaatcaatggagatgagtcttcagaagagaatgaacttttgaacgaacttggagaagtagataagaaaccaatgcaagaaagaatacatgaactaatcccttcctttacattagcttttgagaatagcgttccaaatctgttctcatccatttcaatttctaatgtcaaatgaggaaaagaaacattgctctaattagggcaatgtttcttttattagataagcagtatttaatcaactactttttcaattgttggcattatagcgattggtggtaaagagtaagtccaagcagcagcgtatacgtttaatttttcacctaatttgtagttttcaccattggatacaggtactcttaaaattttattttgggaaactagctcccaccaattattctgataataaagtgcttcttctttcgtaaaagtatcagcaacaattaagtaattatcgtctgctgaaataacatagcccgtgaaaggtatttgtattcgtacctgttcctccttaattggagaagtgttattggctgtatccgcagaagcaggtgttaagccaaaagtaaatccgcaccctaatgttaatgttgtaactactgttaataatttttgtttttttgaaaacataatagaaagcctccttaaattttattaccacaccaacacctttctattcatttagatataaagcctttctgcattcaaatatttaacaattttgtcataaataaaacaaaattgtatgtgatatgtattttttagagtgatttatgatataattcactaggtaaagtattttcgtggttcatctctatatagttttttaccctacttactctgtaaaatattattggtgaagagagaatgttttctctcttctttttttatttgacattaataatatcgttaataaagtatgtttaatattttttaggctattttgttgttggtaattagttttggtacgtataataaaatatggtttgattaagagatttagtcttgacgtacagaatttgcaaaatgttggtgttccgtctttatttacatcaaatgttaaatgtattctaattttaaatgaattcaacataatattttgtatctataatcccaaaggaaactttacatggaaatgaaatttttcctgcagaagcagcctgcatacaagaaattacccaagattccaattctaaaggcaagcggtatacttgaatattaccatcactgttttttacagttacaatcggtgtatttactctggttgtagcaaaatcgtccgttgttatcattcttactgcattattagtgtgaaaaccagtgtttataacttcataaatctgtccatctttctctttaataaccataggtatatttaaatagggatagtttttaatatcattatgaataattgctcctactgcattctttcttatttgaacctcttgcattcttttatgctcctttataatgatttaaacatgtttacgtaaatttattttattttacatctatatctaaagctattttgctcattaaagggttagggtcaattcctattgtgcattcgatctgtgtttttgcatatatttcacgtttaaatttcaacgcaaattgatagggatcgttagtaaataaatgaatgctatccgtaatatccatgaagaactcgtcgatggaatattggtgaaaatcctcaataggaacgtactgcaaagctaactttgttatgtaattagagcatttaatgtatgttcccataatcggatttataataagaatgtcttttcttcgaggaatctcgtataatctggccatcttctttactcccaattcttttaatgggggagtggcagctaatacgaaagaaccgtttctatttacatcaccgactactgccaattgtgtatacataggatctaaccccattttgatgcaacttatagaagcgtaaaagctacgtaaatcaacacataagatgattctattcggtaagatagaatagtcatacactgttattccttcctaaacaaaagaacgtttgttcttattatatacgagcttgtgttcttttataaagaggttttgttttaaaataattttttcagatattcttcttgtgggagcagcagttctaacaacaatcagtaatagggggcgtgacatatgtccatcaagctaaaattttaacatacccacaaaaagaaaatttttatctctctacaccaatttatgacaaatcatttttttcatttttaggataatgaatttcttaacttgatggcaatgacctaacattaaagtgtatgggtgatttctattaattaatatatcaaatttaataaatgtaaaattaaagcataggtgtatgataaacgtatgtaatatccttcattatgtcctaaatgtgccctggatttattagtatttttttgctaaaaccatactaaataaaggccgcaataaaaataaaggtaaaatgaacagaatatttaaaattatatatatcaacttatttaaaggttaatctaatgtaataccatgataccatggttttacattagatatagataattttggaaaaggggaagattctatgaatgttcaactagaaaatgaacaaataacaaaattattaaacgactggtatcaatccatgttaaaacaacaattagttaaagcaaaacaattaaaagagtatatagaaaatgaaattaacaatgtcaaggaaaatcaaaacgtactcttatattattctttattagattttagatacaaagcattaacagattggataagtattaacgaaagcagttttgatgaaatggataatttcacaactccagcagatgacttcctagcttattattatcacttctttaaagcattccattctactttaacatccaattacactgaagcaagtgaacactatgaaaaagctaaagaactattaatacacattcctgatccaatagaacatgctgaatttaattatcgaatggggtatttttattatcaaatctataaacaagtaatagctcttgattatataaaattagctaaagaagagtttttaaaacatgaaggttatgaaataaatgtagcactatgtgacaattttataggtctgtgttgtattgatttaaaacatttcgaattagctgaggagtcatttaataaggcactagacacattccaaaaaaataaccataaaaattctatccttatggtaagacataatttagcttggttatattcaaaacaaaatttatctaaactcgcgattcgtcatgtatctgaagtaacaaagaacaatccaaaccatttcaaagcatttttcgtagaagcatatgaatactataagataaatgaccataattacagcgatcaactaattcaaaaaggattaaaacttagtaacgattttaacaatcaagaattccaacatcgttttaaaattttaagagccctcaacaacaatgtccctacattaactttagaaatatttatttcagaaggtattacttatttcaaacaagaaaaactatgggaatgcgtaaaagaatatgctgatatcttagctctaaagttttatgaagaaaataaccataacaaagcaagtcaatatttttatatgagcaatacagctcaaaaaaatgaattagaaaaaggagcgttaaaataatgaaaaaaatctatctaactatacttggaatatctttaattagtatcctatcgttagggttaaacgactcttttaaaaatcaagctgtaaatataggagacggtggaggtgcaccagcaagaccagattatttattacaaacacacgctgacttataagaaaaaaacaccttcattcttgaaggtgtttttttataatctgatttttaaataaatgaaaaacggaatatatcaaagttctctaagttaacaacatattccaattattagaaaaatattaaaaattttaattttttgttctattatggaaatggtgaaaatgtaggggctttagacctaaattcaaaagatggaaaacttaatcagatgaaattattcactgatggaaaaagtgaatcaatcttaaaagaaaacaatgcaaaagcaggttactgggaagatgttcaacgttgtattaaaaacaactggaaaactatgcctcaatgggctaaatgggcttgcgaaggtgcatgtggtggttgtcttggatgtctagctggttacgcaattggttgcgctgctagtcaaatataaaaagaagggtgtgattcctcaaatggaaatgtctaaaggaatactgttttatagactaacattgattattgcttgtttggcagtagttgccttcacatatccatctgaattctctaaattcgcattaatcgcaggtattgttggtatttttatcattttagccaagaagactccttcctcaaggagcgtgaagggtcacagttcagtgagtaggtgggagatgaattgggttcgaacaagggatggcaggaagccatcttaattgttcgacatatagaaagtgttactccactacctatcgaatgtacgtttggtgtataatagtcatataccgaaatggaggtgaatcaaataatgatgaataaagcctataagtttcgtatctatccaaatcaggcacaagcaattctaatcaacaaaacgattgggtgttctcgctttgtattcaatcatttcctatccttatgggatcaagcatacaaagagacaggaaaaggcttgacctatggtacatgctctgccaaactacctgccatgaagaaagagcttgtttggctaaaagaagtggatagtattgcgattcagtcgtctgttcgcaaccttgcggatgcttatacacgctttttcaaaaaacaaaacagcgcaccgcgctttaaatctaagaagaacaacgtacaatcttataccacaaaacaaacaaatgaaaacattgccattatagggaacaaaataaagttaccgaaactaggccttgttcgatttgccaaaagtcgtgaagtagagggacgtattgtaaatgctacagttagacggaacccttctggtagatattttgtgtcaccatgactgctttctgtatcaatcacaactttgtcaccaacatcgactatataaggcggtgtattttgattatttaagttcactttccaaaatttcaaatcggaaactgtcatcgcttctactggcggaacatcttgccactgcatgatacttatctgtatttgagctgctttttccatatgtttattgtctttatcggtccatcttgcaaagcgttctgaatcatctttttctgttccaggaagaaattttgaaatataagcctcccaatcattaccggttctagcgatccacaacctaccataatactgattccatgtattcggataatcaccactctcataaattaaacctgtttttccaggcttattatcatatccaattaccatcgttccaaaattttgttcagcttgccaatagaggtcattcatggcaatttttgaaagaactttgctgttttcatcgagtatcgctatctcaactcgtcccatttcattgatctttttacttttacatgtaacgtgggcttgcataataaaatcttgtactggcccaccagggatactctttttaacagatgcgccatgccatccattacttgaaccatagtccgaacaatagaattggtaactatctgttttcatttcaccaactggattaccatcttccatagaactaaccttactccaccctacagttgtggacatttcatcccatataagacgttgatttctttctacaggcaattgctccatttttagtggcattccaatacgaaaataatctggttccttttcgtatttatcttcaaaccatacatctaaaaaagtatgtggctttttaatatcaatttcaataatcggattggaatgcacagagcctttgttttggacattggcaattaacccctggccgtcattttcaaaatcaaccgttttctcatttcctaacttataaggcattgggcaaacaaagttcaaaatacctttacctaacgtaacaaaatcctctgaatcaaaatcttcatcaataaccgctaagtatgtcctatcaggtgttacatcaaagactaattcaacaggtttttccgtaattaaccactctgctatttcttcttttactgtttctaagtctgatccatcaggaacgataattccgactggaacaggtaaaactcgcatttcagtttctgtcgttaataatcttgcacctggataacctggaacacttaaaaagttccgttttaatggcgcccacgctggttttttccaacctttttcgatttgaataaaatccttgcgtatattgttaaatgtaaaagagctcacgttgccacctcatttcttttcaaattaaaagagactcaaacttaaaagtctgaatccctctgtgtttctcgttcttgatattcggttgtatagcgatatgtaccacgcgctacatctcgtccctctaaaacaacaggaacctccacaacgaaatctccaccaagcattggaatgactccaccaccagatgatcccgaagaataatgaatcacttgattcgcaacactagctgccatcgcttgtctactatttgacatatttccatacacaccactcataacactctttaaacctgataattgattcatggaattagccatcatccgactcatgtcacccattagttgattcatagttccagtgatacccagtgatctttcttttgaagataacggtgtaaccgtgatggaattccctcttttggtaaacagttcagggcctttttctccagtaataaatgagccatctcctacaggttttccacctttcgcaagcattggtacatgtggaatagtcggcgcgctaactcctggtatattgtttagtaattctgctggtgtattaaagccatctataaatttatttatgatacgaataattccattgatagctgtacgaataccacttttaataccatcccatacgcctaataccgctgatttcatgccttcaaacgctccactaacagcatctgttacccaacgaacaggagtcataatggcttcttttaatccattccagacagaagatgcggttgacttgataccttcccaaatgtttgaaagtgtagatttaataccattccaaatactactgcttgtgctactaatcatgttccaaaccgttgagatggcttctttgatgctattgaatacagaacttgctgtagaaacaattgcgttccataagctagatagatagcttttaatcgtattccatactgcacttgttgtggagctaatcgtattccatgtattcacaatccaatcttttattgaggtgaatattggtgttacaaaagctactaacccgttccagcacgattgtaagaaattcttaacagcattccatacagacattgttgctgaactgattgcatcccaaacggttgtaactgtatttttaatccactcaaatacagttgtcgcaattgaaacgattccattccaacaagtcgttaagaaacttgtaagtgcatcccacactgctgtagctttttctttaatagattcccataccgaagctaaaaactctcgtatagactcaaaaattggagtggcgaaatataaaatagccgtccaaattgcttgtaagtattgtgtaataaaactccatacagtttgaatcactgtggaaatgccgttccaaatcatagagaagaaatcagcaattccttgtaaaataggagttagaaaggcaactagtccattccaagtattaatgaaaaactcactaatcgctgtccacacttcagaagtagtttgactgatgccattccaaacttctgataatgtttcaactactccatcccaaattccagtcaaatattccacaatagaattccatatttctgtagtcgtttcaacaatagaattccatatttcagataaagactcaactatcccattccatacctctattaagtattctttaattgaattccaaacttccgatgttgattcactaatgctattccacgtttcgctggcccattgtacaatcccatcccatatgcttactaaaaattctccaattgcattccaagcatcaatggtccattgtttgatatcatcccaatttttataaattgcaacacctagagcgacaacaagtgctactattatcggaataatagcaaccaaccctgtcatcgcccatcctatacttgttataacagcaactattggtgctaaagccatgaatgctcctgcaattacaccaatagcaacagcaatcgctgttaacgttgctgctaattcaggattattagaaatccattcagcgaatttagaaacaagatctgctataacttcaagaacaggctgaagagcaacctgtaaatcttgcattgcttgttgaaatttaaccgctggagatgcatctattttagaagtagcaccctgtaagtcttctactccttttttcaaatcgacttgtttaccttccgctttcaaaatggtgtcgatgattttcttcccttggtcttcccaaagagtaccgaacatcttcgtgccaagtgcatttctgtctgttgcattttcaacaccagctaaagccttcgttgcttcaagcatagccttttgtccattttcaccaccgccagcaattgcctgaccccatttttcaaactgatccgccgagatttttgttttatctaaaacctcttgcatagatttatctacacctgcaccaaattcggccattttaatacgaccttcttttacacccgatatgttcaacaggattcgcaacatcctgccagttctcttatgaacttctgtacatcactatacagaccagactatatcatcatcttttatataagatgctccccatttcgaatgtcatcagcttacaccctacgcttttcagctagtcgttgcacgttcctttgttaaaggcttcgctcagtattgtctcttttgagagttccactgaattaaaggagttttctatgaatgtcgccactcatagggacaatcatttatccaataggttatcgatattccaacttttagtatctactcctgctgacatgattccttggacttctttagccgaaaatccagcttgaatcatttgatctccatattcagcaataatatctaattgttctggtggaaatcctgtttttaataatgtattcactagccccaatgcttcctcgttcgtaatacctaacgttgcaccaatctcattggtttcttgtataagttcattaaaatcaattccagcgtaggatgctgcaatagtcgctgcccctttaaccacagcggcatttgtttcatcagaagcatctttatttaatgcccattgtctgcgaacaccttctaatgcttcttcagcgtcaataccataagtactaacgcccctaatcgcttcttccactgattttttcgaagactctggaacatcaaaagtgatatcaatcttagttttcaattttgacatatccattgctttttcaactgctgttgcgattccgccaccagctgccattccaccaatgacgttttcgagtcctactttgagtccttcaaacttcttctctgttctttcggcttcttgttgcaaatcccttaactcatttcgaacttgttgaattgaatttccagcatccacagatcgaagagcacgttgtaatttttcaatatcggcttctgttcctaatgcttctcgtccaataatcccaatcgcttgttctaactgtcgacttgtagccgatccacttttaattgcatttacaagacgattacctaatgcccctgcaaaatcatccacgcttttgcctgtagcgctaaacaacgtttctaattgtcttgttgaacttgccacattttcttgttcagctttcatattaccaagcttatttttcaaaccatcaagtgacccttgtgtaaattcaatttcacgtctaaacgcacgatattgttcttccgatatctttccgttttggaattgcgcttgaacctgctgctccgcttcttttaatttatcgagcttttgtgtagtgttttcaatttgttgtgtaagcaactgttgtttttgggctaatgcttccacattaccaggattaaattttaaaaggcgctctacctctttcagttcggttgctaagctatcactctgtttatttacatcttttaaagcgttttgtaacggctgcgtattcccaccaatttcaatcgtaatccctttgatttttcctccagccattctttcacccctttcttagaatgaatcaaagtctttttggtttgcttttctgactttttctttgtctggattctccatttcagcgaattctgcaatataatcaaaacaatctccaattgtcatgacttccaaatcccaatgcgttaatttcgctttataacaaagagcaaggaacgtatcagtggttaattcttcatcactgaacgtcccttgctctccattacttttctttattttttttttgcgcccatcgtactttgaatcatatccataatttctggaataatctctgagatagggaattcatcaaaaccgtctaaccatgtaattggatcatcaatttctggatttgctgttttcgcatataaccaaactaaatcatatacaacttcaaaatctagcttacttaaatccgcattagctaaatcaatagtggctagtgaaccctcttgaggatttgaaggagacaaaatccctaacttaaacatatcagcaaataaatcacgtctgaattgcgctttatatcgtttaacagtagctgctgtactttttaatcggacttgttttccgtctattgtaattgtcttttccatttactattacgctccttttggtgctgctggtgtttttacatatacttttttgtaccagtcgttataaattgcttgtgttgttttagcagtcgttttcgttttaaccattggtcttccaccaggtactaaaacaattgggctagaaacaaacttcagttcatttgtatttggttcagccgaacttgtttttgttttagatgcaagtgttggacgacttgctgaacagttatacataacatgtcgtgttgcattgacatcaccatcaaactcaaataataaagcgaatggttttccttttgcatcagccaattcatttaatacaccatccgtttcgtctaattcttcaccgagtgcatcaatagcaaatttttctgggatagtagcaatacttaatgttccatcgtaaccctgattattacttgccgcgtaataaagcatgtcatctgcatagaattcaattaaatcaccgcgtggctcaaatgttagttcaactccaccaggtaatggaattggtgtcccaaatgtaactaagaaatctttactatcaaatggcacgtaatgtacatttttcaaaccgaatgttaccttgttttcattcatttacaacaacctcgtttcatatgttttttgaaataatttctcagattcaataaaaatcccatacgagtcataaggtatttcatgatcgtctaggaccttttccaacttggcttctgcaaccaagtccttttttgtggtataaagttcgatatttacatcatttatcttgtgatagaccttattatcagccattaaatttgctgaaccatccacaagaaaacagatataaggcggctccggaactggattaccaggtgttgctgtgaaatgcgaataagccacaggataacctgtagcttcaagaatttttctaaattctcctaatgttactgtcatgattcaattgccctttcaatacgttttggcaattcatcaattacatactcttcaactggacgaatatgtactttctctggtactcgtccaccagcagctttcgcatgaccattttctaaaagatgcgtcaattgcccttttgtattatggataacaacagctttatcaacttttttctttcgccagccttttcgataaccacctgtttttttaggactattttgtcttaacttatctacagcgatatcagctacatcttcttgtgcatttgttaattcttcttccacaacatttgcatatctttgtaattctctagcaagctctcccgcaaaatcgttcatattaaacatgctcctttgcgataatagtcaatgtttgatacatttcatcatcattcattggcggttcgataatatcaaagatacggcctttcatattgattcgcatttcttctgtaatatcagaagtataaggaatcacaaaacgataaacccgtgtagcttgtgaagctgaagcttcaatgtactcggaacctttcatcgtttttatcattgaccaggctttctttaattcttgccaagatgtttcgattacttgatttaattcatcttttattactacaggttgctcaatactaattcgattcctgaaatcacctgtattcagcggttttttatactgaaaaggacgcatattaatcaccgtccaacttaattgcttctaaagcttttccaatgcttaaactattaatctggcttaaaaaattcttatcaaaatactctaaggcatcgttataaacataacgagagcgttcaaagactaattccttgaacacctcatcaatattaagatcataattaccacaaaccctagttaaatctttattggatgcaaataggatgcgtcttaggtttgcatcttcatcatcacctaatcgcatcctatctttgaattgctgtaatatttcatttgaaattaccttatccattcacatcattccttatttagttgctggtggagttggtggtgtaaaagaaattttcaaatcataaacaagagctgctttattatcttttggtttaccattagcaaactgtttgattgtataaagcgtagcatcttcaatcgctaatgtttggtcaaactttttaagtttgtatccacctgctattgctgcgatatattgtcctttcacaaagaataatgcttttccaactggaacttcttcagattcaacagtttgaatgttataaggtaatgccattacccattggccattagccgtttgaattgtgttacgtgcttgtacaccaattgcatctacaggattgacaaccatcacaattttatttaacactttacgggattttcctttcccatcaacagataaagcttttactacttcataaagctcaccagcaattacttcaccattttcagaaggagcaaatgttagtgtaccggatgattttttatcagtaaccgcacctgtagttgcatttacatctttcattaaacctacaggttgatgcgctactgatccaccaccatttacaaagccaaactctaaaccaacagaataactttctactaataatgttcgaacataacgctctacccatactggccctaattcgagcatgtcatttggaatagcactaaatgcagttaatttaagttgtccaatttgttcttctctaaaggctgcatttatttgccctctaatatcaccgaataattctccccatgcatacgcttttgttgcgtcagaataaataaacttcgttactgctcctaaatcttgcattccaattgcttcaagtaatggatgttcagttactaaatcttcaaatacacgttcttgtgtagtataaggaagaattgaatcatccttaaatcccccatcttgtacaactgcattaaagaatttacgttcttcagacgttaaaacgttttgtccacgtgacgtcaaaatttgagcgtcttgcgcttcgatacgtgcttgtgctgaaatcttttctgataaatccgttacaagagtatcaaacatatcatcaaatgcagcagataaatcctccatttttgtatcttccgctttcaccagattcatatatgcttgttttttcgcttcaaagttttccattgtacctttaattttcataaccataattgtttcctcctaatttttgagaattaaaaaaaccttttccgtttttgattaccctccacttgtaaatgtggtggttctggattaggtttatttgataaattcatattttgttgtaagttattcgttaccctattaataatctgttccaactgttcatcagtaataccactatcactttctcgattatcaaattctactttgtcagcaaaaccttcttgtactgcttgttcagcagtaaaccacgtttcagcttctaataaatctgtaatctcttcacgacttttacctgttttttgctgataaattgaaactatcgactcatcatatgcttcgagtgcattcaatgttttttgaatatcctgcttgtttccataagctattgttgacgcttcatgaatcatcattcgtgagcctgtgcgcataacaatctcgtcagcagccattgcaataatcgatgcagcagaagctgctagtgatgtaacttccacaatgacttttttatctaagtcctttaagtaattataaatctcaacaccttgatcggcatcgccaccaccactgtttagtttaattttaactgtagatgctctaacttctttcaaagcgcttcttacactttcagcactaatagcatcgtaccaccaactgctactaccgatataacctgataacaccatttcgtgctcatcattttctggattaactgcattagaaaactgataaggaatatgttgtattttatttttcattcttatcacctccttcaattgaatttgcagattgataattcttcgtaattacaaattcgtctagttctggattattagagcgttcagcaccaaacaacttcctcacctcatttctagtgaatgcaccacttgctactaatttatcaacagcctcagcatgatctataatatctttctctttcacaccagttacttcaattttttctcctaataggaagttctttttttcaattaatttcgcatttaattcatcttcaatctttttaattagaggactaatacagaattttatataggctttaattgatgtttcgtagtctcccatatcaccacgaactaatgccgtaggaatacctaaaatattagccacatgatctattaaatctttttttaatttagatagttcctctacagaccttccattatttgaaccatcggcaatttccgtataattaaaaccctttatctttggaacaattgcaaaagcatttttacgaaacgccccaaacaatttatccataaagctttgtaatttagtaaggttttccccttccaaattctgtgcagattccatctcagcggttgcacgtatttgattagaaaacatatttgtctcaatcatacgactaaacagttgagtgtaatctttaaatattccactcatgaattttgtcaattcttcattgttataagtaatgtagataacctcgtccatttgaaatgacctttgaaacgtgtaatcctttacggttacatttttaaatacatcagggtatactgcatattcaacacggtcaaaatgatcagcaatgagtaaatcattttgatctgtaagaattgccaacacttcattatcaagtatcaatttgtacacaaaatcttgccaaaagtcagcggcactttgatctgtattcggtctaatattcaataagtaatgccagtcattatattgacgtgtatcctttttcatcatccgaaattcagacagcgaaacggttcgagcaataaaattaatacaagtttctaaagctactttttttaaatacgctctttgattcgtttcaataccaaagaaatcaaaatcatttagcatcgtattaatctctttatttttaccaagtacatccgacaaccaactcatatttcctcctcacccctttcttaaaagtttaatgcattcagcaagtctagcgctgcgccaacatctgtttctcttacctcatccgctcgatacatagcatgtacaaacgcctggaatccatctgtttttctacgaactggttctttcttctcatacattttatttccatcttttttaataacaacgagtacattattggtataccaacgcattaacggattatcaccaaatacaatttgacgatgtgcgaatgcaacttcaattctaggagcaagcaaaccatgaatagctctcggatttctaattacttcaacttcaaatccagcgtcctcaaaaagtgttcttaataaatctgcacgataattatccattatgatttttttgatatcataatagtttcgcatttcaacaaaccaagcaacgatggtatttggatcaattgtttcgccttccacaactgtcagaagatcttgctcttcccattctcgaattggtgcaaacttcttcttaccagctatttcagcatcctgttttttcgaataactataatatttatcaacgaattcctttctagcatacgaatgagatttccataaataatcacccttacttctaaaaagtaatccacatgatgcgaaatcacgaatacttgcataatcaagcgcaccaatacattcatgacctcgtaaatctggcaattcacgattagttgctgcaatctcttcccattttgcaactgacctttctaaatctgtaacaggtaaattcattcgttttgtcatgaactcttctctattacttgggtcatcttctaaatcttcatattcttcttttatagtttcaagtaacccctcagcatattcgctcaatggtttagataacataggattagcaagttcccaattatcaatatcatccacttcagtttcatcattcaatttacagataaaaggaaagacagcattcggacgtgcttcaccgttcaataccttcattgccttttctttttgcttatctaagaaaccgtcacgaacatatccatctgtaccaatataaaattcacgtgggtttttctttttccctaaaccactgatatgaacgcggacatctttattactttcgtattgatgtatttcatcaaatacaaccgcaccatcacgcaaaccatcttttgtatcaccgtttgaagtcctaaacttcagtacactttcagtagcctttgaaaccgtttgagttaacgtcgttttaaaggctcttttcaagacctcattcttcttcacacatttatgaacttcatcagggcttgttttcgcctgttcttcactattcgcaacaactgaaatgttatactctggaatgccatgtaattcactaattaaaaaatgaataataacagaaatcagaccatttttaccgccaccacgccctaacatccataggaatttacgataaaatacacgtccatttttcttataaaacaaaaagacgaatgctattaagaatttttgaaatggttgcatcggaaaataccacttctcaccgaagttaatacaatcctcaatcatttcatcatcaaaatacaaatcgtctctatttaaaacgtatttttctagatatccaattaacagttctctttctttattgaacttcactttcccacttcgataaagttcaatatattcttctacatatttttgcttaatcatgtaagatcacttttgttatatcctgtatcagggttagtatttttaacaacaaactttatatctctccctaacgcaattaaagaactgttaattttattcctctcacttataagagggtgggccttaacgaaaacttgagttccatttttgattgttacggattccccttctttagttatcgttttattaatttttcgaaatgctttaactagatcaatatagcgttccaccttttcaacttcaactaaatctgtcgtatcaacactattcattaactgttcctttaaccttacaatactaacagccatctacccacccccccttacgcgcgtattttcgaaaaaaacctgtcagttaaccccctcctccggtgccccttagacgaaatattgatgaaatattttaagggggggtgttattaccgaatcatttttaccacttttcatcgttttcccatttgttgattttctttttgaatgttctaccgtgttctttattgtggcaatccacacagattgtttctaaattatctatttctaatgcaagtgctggatgatgttcaagctcttttatatgatggacaacgagttgaatcttcttacgttttgcactctcgctgtattcattcgtgtctgtttgtactcggccattacgtttacattcctggcactcatagttgtcacgcttctttacttgttctcgtatactcttccactcaccactgtcatagaacttacgcttctgctgtttggttttgtattccttcattacacattacaccaccatctgcacaccacttacagcgtaatccatcctttgattttgctattcgttcactatactgttccgtatatccacatgctttacatctaaactgtacaatcttttgtacccttttacttcttaatagatcgtctattagtttgttcattaaacttatatcggcttctctctttgctgctggtgttagattgttatgaaatccttctattacttcaattaagattggcaacttctctacatctacatactcttcaatatcatctaccccaaccgaatgtataagcgtactaatcgcaattgctttctcaagtttagttaattgcatctatcctcaccccttacacttaaatcctttctccgtctgtctctttctagtaattcttttattgatgtttgttccaggtattccacggaataaaacataggtttcccaccatacagcttgtaatacttaacatctattccagcttttttatgcgctttttcaagaggtttaaggtatttgatatatgctttcttatcaatgagcataagaccaagcgcagcaatcttaccatttaaaacgctgtccaattatcctcaccccttatcttctaataaactagcaatcattttatttagtacacttaatgttgcttctccacactctttctctgttgcactgtttactatcggtccgaattcttcttctaatagttgtaagtcgacatgtttagcaagcacatcctcacctacagctataagaattgaactaacaatacctatcttctcaagtttagttaattgcatataccctcactccttatttatcaaatgcaacacgtttgcgcttatctttccttaacaacaaatataatttatatctgaatgtttgaattactatcattaatacgtttgacaatttctgaagccatcgtcttaccatttaaaacgatgggacattctactgtaatatctttcagtgcgctctttcccttaaacctactcataaccttttccaacttctccaatgcagccgtacattcattagcagcttccgttacttctttaattccttttaatgcttcagttgtttcaacatttaattcaattgttaatccttgaatattcttttttgcatcatgtgatttttgtgtatatttgttcattacccacacatctacaaaagcaccattacattttggacaaactgttacttcttgatattcttctttagatggatgataaactttatccatatgaccacatactaaacatttagccttattaaaatactttttcccttcattcaccttactcactccttatctctatctatatactcacgcttttcagaatcccaaacctcacaatagtcgaaacgttctttttcttcttcataccatttgattgcttcgtgcttagaattagttgttgtatgaatatcagcaaatccaccgcaaggataatactgatcgaatcccaaacaccaatatctatcatttaaattgatttcgtccatccttcattctccttcaatcaatttcttttacttcttctatcgcatatactatagcatccaaaatattttccccatctacctttttatttagagatttttgtaaattatcaaccgtagcttttaagccctctacagtttgagataatccttctaccgtttcctttaactcctgattatcggtaaataattgattaatcttctttttcaatatgatgttttgtaataacgcatccttcattacttacacgcaccacctatataatttttacataataaaaagcacccaaatcgggtgctcgatatactgatattcattaagaaaatatataaaaaaacagagaaattcacttccacctcttgatacgcatcgcgatgcgtgttataataaatatagaaagttgaaaggaggtaataacgatttctagtagggaagtaattaagaggttaaaaaaagaaggatggcttatagcgaacattgaaggcagccaccatcagttcaaacatccttctaaggttggcaaagtaaccgtgaaacatccgtgcaaggatattcccaaaggtacacttcgctcaatctataagcaagcgtgttggttataaaccgccccttgctttccctaattatacaagaaatcgttataaaaacaaattatgaaaaacatttcaattaatggaaaaccgtagagtttctatccttaagttgatgggcatggggtttccacagatgaatagtttttatagtcaagaagagttgagcgaaattggctttctatctgtcggggaaaatgtattaataagtaaaaaaaccagcatatataatccaggtgctatatctgttggaaataatgtaagaatcgatgacttttgcattttaagtggtaaaattacaattggaagttattcgcatatagcggcatatacagcgttatttggaggagaaatggggattgaaatgcatgattttgcaaatatttcatcaaaaacaattgtatatgcagcaattgatgattttagcggaaatacattaatgggaccgactattccacatcaatataaaaatgtgaaagctggaaaagttgttttaaaaaagcatgccattgttggtgcgcattctattatctttccaaatgtagtaataggagaaggagcggcagttggcgcgatgagtatggtaaaagaaagtttagatgattggtatatatatgttggggtgcccgtaagaaaaataaaagctcgtaaaaaaaatatagtagaattagaaaatgaatttttaaaaaatattaattcctgagtgtttaaaagattttgttgcagcatttctcaaaaaaataaaaaaagacatgtatgaggggatattatgtgattactgtattatttaaggggctatctttatagttgtctttgtgtagtaaagaggggtgttgtcacacattgctatcccaaagtaaaaaacgttattctttctaaataagctaaataggaaggaataacgttttttttatgaatttctcgattgaatcactttatatcattcaagtaacaaacaattataaaaaattgtttgttacttgaatttatttcgatttgtatagagttaaatttcagcctctagtgttgcgatatatataatttaagcttctattttttagttgcagataataccttataacgatgtcttaaataacaaaaactataagaagtaaattcaatacacacacacacacacatatatatatatatatagaaaaactaatgtaatttatgttaaaagaagagtagtaactttaaatatggaaaatgaaaaaaatttataggaggctgccatttcatacagtttggcggcgtaacgcaaatatttcggctaaattaatgaataaattatcggacaaaaataagcgctctaactttgaatagaacgccattttaccgtattacctggccccgaaaaggctcgaactcaatacctccaccctgtgaaggtggaggtttattttattacttttcttcctgcattataaaattccaaaaacgttttaattcttcacgcttttgggatggagcaagttttatatcatttaaccattgatctagttctttattgtttctgtccgctttaacattagaatctcgccctagaaggaaatcagtagatacattaaagtaatctgctatacgtatcaaggtattgtaatcaggttgacgttcattgcgttcatacataccaattgtactttcacttagtttaagcgattgggcaagttctttttgtgtaatgcctttttgttttcttaaatcacgaattatatttccaaacgttttcattctatcacctgataatatattaacacattatgtgttaaataattaaaatttttaaaagttgataattataatctattgacaacacaaattgtgcggtttatattttaattaacaacacgaaatgtggttttaggggtgaggatgtatgaattatgaaagagtagctgaaaatctaattaacttaagaaatggaagatccagagaagaggtggcaaaagcagtgggaatcagtattagtacattacagatgtatgaaaatggacagagaatcccacgagataatataaaaataaaattagctaatttctatggtgttacagtccaaacaattttttttgattcggaacaacacgaagtgtgttgaataatgttagatttttaagataatgtagtgattttttagaaatgtaagcttagaaaatgtattaggcaattttacataaaattataatgtttttatcattatatataaattatagggggtatttgcatgaacatgaaaacatttgaaatacgtgaaaaacgattagcagaactactaggtgcaaaagtactatgggaatttataagtgccgtaacagaagaaattgaaaagcaggagttagagtctacacctggattattagaagatctattcatacatgtgaaagaaacgattcaaattcaaaatatgaatcaacgcagaacaaaagcccctgtaaaaacagaggctgatggtataaataaagatacattatttatggaagcatatgtagaattaattaatcataagtttgttatttctgaattagctgtagagctttcatctgttctaaaagaattaaattgttttgttcaatcatctttgccactgcttcaaagtgagcttgattctcaagaacctcaatctgcttctctttagggagtgattgaagtatttcttttatttctttacactcgtatatgttattctccgagtcttcaattaatttattgcgtcgattggtgtattcaagtgcacctaaagttgctaatgcgcgaggatctaatcctagaatttccatgtattcctctcctttcctctacaataattcgataggggaaaggagattcctttaatgatttggtaaaattgtgaaaggtgacacttatgttaacttgaatatcttttactaacctattctgtataaaaaatagctgcactcaagtacagctagtcttcttcacaaacttagatggcctcgatgacaaattgggattgaggtatatatagtaattgggctgctaaggaagttgttgtgttagcaaatggatatgcttccttataaagaaatttactatacactatttcattcatttcaaaggtcgtatacagttttttaaggattttttgagaaattttatttgtgcaagcagcaataaaatcaaaatcttttttacttatctcttgaatggcatgtgaaagaagggtagtgactataccacttcccatccaatctggatgacaagcgcccatatctagatagaccaatttttctttatctaaatgagaaaactcaatagattctgtctctaatgtatctaaaagttgaaaaataggttccatttgcgggcatagttcaatcgctttctctgtatctattagtggctgggttactttttttgttaaaagaactccaacaatttgaaaattttctattgctacaaatgacatagcttgagatacagcttgtttcatcatttcttcgcacattttgtgaaaaggggcaaaaggaatttgtaaactgcttacaagaggttcattattcacaaaagaatgtgcaagtaaatgtgctgcatctttcacgtggtgtgtatcaagtagctctatattcatatgtttttcctctttcctgatatagtgaatagtaattaaaaggattaaaaattttatttcatttagttaagtttaactattaaagcgctaacaaatatggttatgatacatatgaatgaatctgtttagtggcaatcgaaatatgttcataaagaaattctacgatctcatctatacattcaacagttgtatatggagagatagaaaagaattataatgtagaaatcggatttctatcataactgtttattacatctactacacaagaacgagttgtatcaccaaaaaatacttgatcgcgattttttcctaggtaattaaatagttctatatttaatcggtttgtatcctcaatttcttcctttgttgcaaggcctattcgttctttttcccaattttcttggccatctccattcatatagaaacgaaaagttgtaattggtccatatgtaaaatcatttgtgattgcgacttgagggagggccttgcgcaacttctctctaaataatagatttacacgaatataatttgctaatattttttgatatccttcaattccaaaggctaatagattgatatacattggaatagcactaccagatcgtgaacattctaaggtatagcctgtatgataacttccatatgacctattaccaagataaggtgtgtcatcttgttcaatgtccatcagttgtaaatcagtatgattttttacgattaaaatacttgaagcataaggtgtttgtcctaatttatgaaaatcaaaacatacactatcagcaagtgccatgtattgcattttatcttgtacgtatagtaaagcattttttaagttaggttcaaatgaaagtggattttcttcgaaattataattattaaagaaactatagaatccacccattgcagaatccgcatggatataaataggttttaatttatattttttttgtattgcttcagcgctctctttaattttttttatatcatcaatggtaaaagtatctgttgaccccatagtagctagaatataaaggggaataccaccattattaataacttgtatcatctttgcctctaaatcatctatatccatagaatttgaataaggatccgttttcactttaattaagtgatttgatccaatgccagttgcttcagctgattttaataaactatagtgtgcattttcagaagcaaagcaatatacattttgtggagcaccatattcttttgctaatgggaattgtttagaaattgctaagcgtaagctcgaaaatacacaaccttgtccaccccatgttgtataaccgccgctattatgcggattataaccaatcagttttgaaagcatggatacaacttttacttctgcttctgctgcccctgggccatagacatcccaaacaccattaccatttaaaagagccatggttagttgacccaataatgacggaatacttggtagtggtacggcgttcgataagtagtatttatttggataaggatggccattcataaattggtttagctcttctataacctcagacatagtgatgccagctagtggaatatgactttggtgaattaagccattgtagtatccttctgatttttcctcacatttacctaaagtagctcgctcttcattttttaatcggtcaagatttttaattattttctgcatagattctaataaaagttgttgtttttcttcatttccgtcaacgctcggaaataattttaaaatatcttgcatgcagtcacttctccttgtgaaaaactggatttttattttacttggttaaacataagagtgtaataatttgtaatttcccttttgaatacttagaaatgaggagctatttagaaaaaaatgtaattccatagaagattatatgaattatagaatttaaagtaaagaaaaattttttgatttatttcaaaaaaattaattgtgagataatgaagcttctaaaaatatttctgaattaattgtttatttggtttgcatgatgccctagcatgtatttaactaatgtagtagatattttaatataatgtaaaacgtattataaggtagttgaataaaagggttcaactaccttataaactgtagaaattgttggggaaagataaaaaatagggtggaagtgctaaagatatgttctagttgggaagaagtagtagtatggatttggtagaaaaatcagcataatttttttatggaataataattattcgatcaaagttttttaatgaattcaatttcattgtctaataataatggacgagttaagtgtgaagagttttcttcaacctgagtagaattttttgcaccaggaatagcaactgaaactgctgggtgacttaaaacataacgtaaagcaacttgcgctaaacttcgatttgagcgtacaagtgaacgtaatttctctactgtgtgtaagctatctttaaaccatttttcttttggccaatcttttcttaaatcatcgtctggaaattgagtttcatgattaaatttcccagttaaaattcccatcttaagtggacctcttatcacagcacctaaattatgtttttcaatataaggaaggatgtctttttcaggttctttattcaaaatactataatcgaattgtacgacatctaaatcattagcctgattaaaatgttttatataatctaaatcattagtagaaacaccaacagctcttactttgccagagttttttaaggtttggaaagcttgtagaaaggcttctgtttcttcaggtttatcccaccaaatatgacaaaagtaaacatctatataatccgttttaagccgcagtaaactagcctcaaacgcatcaatgatcttttgaggatctccataaacggctggttgattggggtcataatgatgaccaattaaaccaccttttgtagaaaggattatatcttgcctgcgattatttatagcttttgcaacaagtgtttcactatgacctagtccataaacgtcagcagtgtcaataaaattgacccctagatcaattgctttctcaattgcatcaagtgattcattatcttttactgctccccattcatctccaccaattgcccaagaaccgaatcctatttctgaaactattaaccccgtgttacctaataatctatattccattatgtacggactcctcctttgcagcttatgttataagaagtatatatagtgaccagttggaatattcttgaatttattttcggagtataaattagactatttcctttaataaaatatgtaagattgctgtataaaaagaaattagaattattagtgaaatggttttttatgcttaaattgaataaaagtatgaattgatacagtataaatatgagttttattcataattttaataactatgcaataagcgaaataaatgttgaatttagtcggaaaatatagatttacaaattgcagaatgtgtacatatagttgtaactgtaaatattatccgtttttaaatatttataaaaggagaaattcatatgaaagaaatacaaaagaaatatgaaattgtagaagaattggatgtaacagtaggccaagaagcattatggatagctcatcaaatggaaatagaaaaaggaatgaacaatgaaccgattataataaagttaaaaggaaatcttcaaatagaggttttaaagaaaacgcttactacaatagtacaatcacatccggcgctacgtacaatatttaagaagagggatgaaaagataaagcaattaattcaaaggaatgtagaatttgatataccaattaaggacttaactgcttttaaaaacacagaacaaaaatctattttaaaaaatttcttagaatctatagttaatgagaaatttagtttagaagaggggcctttgtttaaattccacatcattaaattcagtgaagatacatttattttacatttaatgtttcatcacattatttacgatggatggagtttaggagttttcatccgacaattatccaatacttatggtgaattacttcaagggaagtcgaatgtagaatttgaatctccttataagaacctcgtagagtatgaggtgggttttattgatagtgcaatatataaagaaggatcatcgtattggaaagattatttacaaggtgaattaactcctacagagtttcctattgattttaataaaataaatgaaaagagatatacagataaaaatataagcaagaatattaattcggatctattttatcaaatacaatgttttgctaaaaaaaataatataagtatttatcgagtaatgttaagtacttattgtacattacttcatcaaatgacaaatgctgaagagataattgttggtattccaattaatactagaccacatacagaagaacgagatacttttggctactttgttaatacaatacctatacgtataacaatagaaaagggagaaacatttaagggaatacttaataaagtgaataaatctattcatctagctattacgtataaacataatccatactcacatatagtaaaagatttaaatctaaatacaaatacaaatcataatatggtatattccacagcatttaatacgatgaagataccggaattaaaaattcctgatattgagtcaacagttttaacagattgtaaaagagtaaatccttttaatatgacttggagaataatgcgatatgaaggggaaacagagaataaaattgaggttgactttaactcagcattatataaaccagagagtattagtgatttagtcgaaagatatatatatttgttacaaaaactaatgaagaatgtgaacgaacctatccattcattggatttacttgtagagaaagattatcgtctatacaaagaaatgaactcaaatgctcttacatatcctcattcaaaaacactagatcaattaatcgatctacaatcattaaaatcaccaaatcaaatagcgatttcaatgggggataaatccattacctattatgaattacagcaaaggtcaaatcaaatagcgaattatttacgtgaaaatgatttgaaaaagggacaacgtgtaagtattacaatggagagagagattgataccattgtatggattctaggcatcttaaaatcaggtggagtttatgtaccaattgatccaaagtttcctgaaaaaagaatagaatacatcttaaaagatagcgaaagtcaaatgattattacgaagaaagaatacaggggattggttgataggtttgcgattcatacaatttatctagaagattttcattacgctaattctatagaaaatattgcgtctacacataccatagaagatgcagcttatattatctacacgtcaggttcaacaggtttgccaaaaggagtcgttgtaccacataaaggtgtagttaatttatcatattcagtaatcaatacatttcatttaggaaaagaagatgtgtttttacaatttgcaacgatcatttttgacgcctccattatggaaatatttccgattttgctatgtggagggagaatgcatttaatttctgaaatcgaaaaacgttcagcagaggaatttataaatgtaattcaaaagaatggtattacaaatgtggttttaccaactgcgttttttaaattaatagctgatatgccaaaagaaatgttacttaaattaaattctgtaaaacgtgtatttgtaggaggggaaactttacctgctgaatcagttcgtaaatggcaaagtaaattagggttaaagattccagttcttaatgcatatggtcctactgaaactactgtatgtgcaaccatgtatgaagtaaatggtgagatacaaaaagaaatctctaatatcccaataggtaaaccaattgctaataatgaagttttcgtggttagtccgttcaatacattatgtccgtcaggtgtagtaggtgagttatttattggcggtgatggagttgccaacggatatttaaatcaaaaggaaaaaacaaaagaggcgtttatctctttcaataaatcctataatcatgataaaaagatgtattgtactggagatttagtacgtcttttaccgaatggaaatttagaatttatcggaaggaaagataatcaagtaaaaatacgtgggtatcgaattgaactggatgaaattgaaggaacattatttaaacatccagaagtgagagatgctgtagtattcacgtatcaaaacgacaaaatcgttagcttttatttatcaaaagacaatacagaactaaaacaagaggcattaaaaacattcttaagtgaaagtttaccagattttatgatgccaaattatgtatttcaccttgaaagttttcctgtatcaccaagcgggaaactagatagaaaaaaattagaattacaaatcccatctttactttcaaacatgcagaagcaatatgttccaccgataagtgaaacagaaaaaagattggcaaaaacatgggcagaaattttaaatttagggaaatatagaatcggcagagatgatgacttttttaaacttgggggacattcattaattgctgtgcaagtgttaaatcaaattcaaaaagagtttcatctaaaaattgaaattagagatatttttgagtatacaacgattgctagtctgtctgcttacatcgataaattaatggcagtaaatcatgatagggaagaacaggagatgcaagtattaaaagttgcagataaggaaagttatcagttatcaagtgctcaaaagagaatctggtttttaaataagtataacgccattaatagagtatatgatacaccactacacatatatattgaaccgagcttgaaaaaagatatcttacaagacaccataagatttttagttgaacgacacgagatgctacgaacagtgtttattgaaagaaatggggagcctagacaagtcattttaaactcaatagcgattgatttgattcacgatgagattgaacacatgactaaaaaagaacaacaagaatatatacgcacaacaataaatcaaacggatcatacaccatttgatttagaaaatggccctctttttaggattagaatttttaatctggataagaaaaagtcttatttatatatcaatttacatcacattattacagatgagtggagtgtaaggaatttattagatgaattaatgaaggtatatagtgcctttgcaaaacgtagaaatcctgagttgccaactatctctaatcgatatgtagattatgctgagtgggaacaggagcagttaaatttaggtcggtgggatacggaaaaatcttattggatggccgaacttgcagcacctcttcctatactaaaccttcctttagattttagtgggaatcgtcaaagtacaaataagggtacagtatttgaaatgaagttagataatgaaatgaaagagtctttgaaacaagtatgtgaacaagagaatgtttctatgtatatgctatttttagcagcgtatattcaattgttacattatctaacggatcaaaaagatattattgtaggtacaccggttgttggaaggaatcatcaagaatttgaacaaatacaaggattctttgtaaataccctagcaattagaacacaattgaatgatgttaaaaatttaacacagctattacaagtagtgagagagaaatgtttgaattcattccaaaaccaatcatacccatttgataaagtaattgaacaaataaatcctgatagaagctatggaaataatccgatcttttctactatgtttagttatcagaaagatattctgcagcaacatgatgcgtataagcttcagttgttacctaataaacaagatattagtaaatttgacatttctttagctgttgaagaaggattggattatgtagggatttcatttgagtatgatattaatcttttcaaggaagagtcaattaataggtttactcaaaatttacttactatactggacgcctttattcatcaacgaacagtagcatatgaaaatctttcattcctatcacaggaagaagaatctttatataaaaaggtaaatcatacagaaagaccctatccttattttcaaaatatacaggagcaattctatatgcaagtagatagacaatccaatcggattgctatagcgactgaaacggaatctttaacatatagacaattaaatatgtgctctaatcaagtagctcaacatttactcgaaaaaggtataaaaagaggtgataaggtagccatatttttagatagaagtatgaatagtatcgtttctatgcttggaatattaaaagccggtgctgcctatataccaatcgatgtaaaataccctaaggatagaataaattatatagttcgtgacagtgaggcatgtagaattataacgagtaacaaattcaaaaatcatttgaatgtaagtgattataaggtttcaataatagaggatatatatcgtacaactataaatgatgatgtgaaaattttaaataaaccagatgacttggcatatgtaatttatacttcaggctcaacaggaaaaccaaaaggtacattattaacgcataaaggagtattaaatttagttgaatggagaaaggaaatatttcagatctctccaaatgataaagtaacacagttttattctcatagttttgattcttcagtatcagaaattttttctaccttgttaaatggggcggaactatatgtattaagtgatgaacagcgctattcaactgtcgcatatgttcaagctattcaagaaacacaagcaactatttctgacttaccaacagtttttttcaatgaattatcaacttcattaactaaactggattgcgaaaagatacgttctttaagatttataataatgggaggggaagctgcatcaacaaatgctattagaagttggcaaaatacttttaaaaaccaagtacaactggtaaatgagtatggccctactgaagcaaccgtttcagcaatgtattattttataccagttttagaaggcgataataatcttttaggaagcataccaattggtattcctatttctaatacaaaggttcatatattgaattcatatatgcaacattgtccggtaggggctatgggtgaattatatattgaaagtttaggattggcccaagggtattggaagcaggaagaaaaaacaaaacaggcatttatttcaaacccattttcagaagacaatagtaaaagattatatcgaacaggtgatttagcaaggtggttaccaaatggaaatatagaatttatggggagaaaagataagcaggttaaaattagagggcacagaattgaattaggtgaaatagaagatgcaatgttacaacttgaggggattagtcaggctgtagtaacacaaacggaagatggaatgttactgcaagcttattataaaacagtggacggtatagggatagagaaaaataagttagctttacatttatcaaatgtattgccagaatatatggtccctaaatattactctcatgtgttagaaataccaataacggcgaacggtaaaattgattttgaaaagctgccaaaaatagagtttggtcatgagcaaaaagatgagtgtaaacttaaacctcaaactaaagtgcaaaaagacattgcaaaggtatggtctgaagttctaaacgtaaaatctataggtttaaaagatgatttctttaatttaggtggacattctttaaaagttatgccagcattagtcaaattaaaaccgttataccctaacttgaaaattcaagatttctttaagtatagaaccatagaaaaattagcctctcatattgaagagatggaagatatatcgttcaagaaagagaaaaatatgaatgtagcatgtatggaaaatgaaacgaaaacgactcgtgtttatgaaacaactaaattagaagaatgtgagttagatatggtgaattatccaaaggcagtttttcttacaggggcaacaggatatttaggagcacatattttagaacggttattacagttaccatctacgactatttactgtttagtaagaaaaagtgagggtcaagtaattggtgcaaagttaaaagaaagaatggagttttatttcggtaaagaaatcctccaaaagttgaaggagagagtagaattaattgaaggagatttatctttgatgaatctaggtctagattcaaagcaattggaccatttaaagaatagggtagagtcaattatacattgtggtggagaagttagacactatggagaacgtgagcattttcaaaaggtaaatgttcaatctacaaaatacttattggaattagctaagaacacaaaggcacgttttcattatatatcgactttaagtgtagtaggtcaggctgaaagtgatccaaaagaatttgaattctttgagtctaattttgatagagggcaaaatttagataatctgtacctggaaagtaagtttcaaggcgagaaaatggtcagagaagcaatggaaaaaggagttcgtgccacgatataccgtgtggggaatttagtgggtaactctaaaacaggtaaatttcaatacaatattaatgaaaacgcattttatagattattaaaagggatatgcctatctagcatagctcctaacgttaatacgtatgtagatttaacgcctgtagactatggaagtttagctattactgaattatcttataaggccaatacagtaaataaaaccatgcatatttgtaatccacatcagcttaaatgggaccaatttattaatagtttacaagcttttggatacgatatcctgttaatgaaacaagagaagtatatagagaagttttttaatacgaatctaactactgatgaacagaaagctttagagctcataatgcctttattagaatctgtagaagagttatcagtagctataccatcttgtttatacacgcaaggatatttgaagaatgtatattgtttagagccaaatcaagagtatatcaatttgttattaaattatgctatggatataaagtatttaccattaattaaagaaccaatactgttgtagtataatttatcaattttgaacaaaaaagaacctgtttttcattgagaacaggttctttttctggaaagagatctacttattggtatggaacagatttcttttcaatagggttgggaacgcactattgaaaatatgaatatacaattatgcgtttttaaagtaataaaatttgatatataattgaaaagtttttgatagatagttttaaattctttttagaaatttatttattaatattaaaaattgaaggtgataccttgaagttaaatgacatttaatgcattctagagggggagttaagttgatggaaaatgaaaacatatcaaagaaagaaaagattatgaatacaatattggagttaattaaagatgaacgtttgtaaaaggtatttattgaaaaaacgtttataaaataaacttaatcacctttataaactggatattccaatgtttcgtatataaaccctttttgtttgtaaagctatatcttcataaactccattcacttatcccattagttgatttaatattttagttggtattttagagaacatcgactttccgatgcaaaatagtccatatttagccagaaaatagtattagtgtacaacaaacatcttaatctatgtcaaaattttgtctaaacgtacaattttcttttttgatatggtgactccatgcccatcaacttaaggatagaaactctacggttttccattaattgaaatgaataaaaaatgcacctccaattgttagactgtgtctaacaattggggtgcacttcagtgctgagatgcactttgaacggctttttttatgagaattgtttaagtgctctttcggctagtaaagcaaagtattctgcacttataggcagtgcctcttcattaattgtaaaagcaggatgatgccattcatgtgtaccgctcgttcccataaagacgaatgaacctggtatttcctgttggtaaaatgagaaatcttctccagccattgacggactaggcgagatgatattaagattcatctttgtggcaacttgagtagataagtctgtaagagctttatcgttgtgaacagcaggaggacctgaataaaaacggaatttcgtttttacacctaatgcatcagatacacctttaataatacgctccatgagtgctggaatcttttcacgtgtttcagcttggaatgtgcgaatcgttccttctaacgtagctttttcaggaatcacgttccacgtatttcctgcatgaatatttgtaacactaacaactgcattatgagatgaacttatatttcggcttacaattgtttgcagtgccatcacaatttgagaggatgcgacaataggatctactccagcatctggtacagccgcgtgtgtaccaactccgtgaatttcaatttcaaatcgatcaactccggccatcagtggaccatctttaatgccaattgtacctattggtaaatcaggtttattatgcatgccgaaaatcgcttgcacattacgtaaatgtccagcatcaataactttgcaagcgccattactactttcttcagctggttggaatatgaagcgaaccgttccatttagggaagattctctttcttttaataagaaagcagtacctaaaatagcagctgtatgaaaatcgtgtccacaagcatgcattttccctcgtactttagatgcataggacaaatgtgtttcttcttgaataggaagggcatcaatatcagcacgaactgctacaattggtccgtttttattaccagacacttcagcgataattcctgtttctaaattggaatcaatgatagtaatgtttttttcttctaaccaattttttattgcttttgttgtttcgaactcttcatatgatagttctggatactcatgtaaatgtcgacggatggaaataagtttttcttttagttgatttgaaatagataccatgtagtatgccttctttcttcagcaaaatatttatcataagtatacaacaataaaagagaggattctcaaatgaaaatcctctctcgtttatcccataaaagcccgattggttcaactaattaaagtttcactttatgctgcgacttttttatgcgtatgatgtttacgataacgtccacgcattgcgtatgcaatttgcgggattgcaatcccaattaatataagtgatacaccgaaccattgtgaagatagtacagcctcttttaaaacgaatactgacataattgttgtaactggtagttccgctgcaccaagaatagtcgctaagccagaaccgatttttggaatcccgattgtaaaggcaatagatggaataacgatactaaatgttcctaatcctaaaccgtatttccaaagaccttgagaaatggcaccattaaaaataaatgttggtgggaatacaatcatgactaaagttaaagcaccagtcattaagagaacaccgcgcggtaatgaaggtacttcaacagcaacttttccgcttacgaaaatgtatgttgcgaatgtaacagcagataataaacctaaaatgaccccagtcgtatcgaaagcacctactgattgttcaagtaaaccacttgataaaaatgtccctacaagtaagaaaataacagaaataactttttctcttgaaggtaatgtttttgttgcgactgcttcaatgataattccgacccaaacgaattggaataaaagaataattgcaatagaagctggtacagtttttaatgaagcataataaaaaattccggtaaaacttgcagatgttcctgcaacgaataaaagtaatgcttgctttaaaggaacgcgatgtctagaaaatagaagtgtaatagcaagcaaaataatccaaccgaacaaatattggctgccaattacctctccaagtgaaaatccttctgcatatgcaagcttaacaaaaatagctaaaattccataactacacgctcctaataaaactaaaagagaataacgaagcatgaaaaattcctcccatctatatgaagttgttccgtatcgaaaatatataactagagggaagtatacaaaattagaaataaagggtcaaatgaaagaaaagtatgacattttatagaataataataaaagtatgatatttatgcataatcttgaaatttttaatagtagaagtattataaaataaactttgcattgtatagagatagcatttgaaaaaaaatattttttaaaccaatatgtatatagacgtactagtaacgtgctaattatttgagaaactatgttacctttgttatggtaataacaattaaaggagttttataatccatttgggttttttctatataatagaaggaaatgaaaacgttttattagaaactgtgaggaagtgcggtttttcttattgccacgttgtaaaagtgatttcacgaattgttcatagtatttttatgtgtttttgttacaatatttagggagaggagtggaatgatgcaagatattagtatttttttagcgtttggcgccgggttcttatcatttatttccccatgttgcttaccgctttatccggcatttttatcgtacataacaggtatgtcggtttctgaattgaaagaagaaaatgcaatgcttcgcaaaagaagtatgatacatacagcgtttttcttacttggattttcaattatatttattgcaattggatttggtacaagttttattggaggaatctttactgactataaagatttaatcagacagttaggtggtatatttatcatcgtgttcggcttaattattgtcggggtgtttaagccgaaatttttaatgcaagaccgtaaatttacatttaaaaatcgtccaagtggctattttggatcagtactaatcggattagcttttgcagcagggtggacgccatgtaccggaccaattctagtgtctgtaattggattagcagcaacaaatccagaatcagcaatgatatatatgattgcttacatacttggatttgcaatcccgtttttcgtactgtcattctttattacgaaaatgtcttggattaaaagaaatagtatggccttcatgaaagtcggaggatatattatgattgttatgggtgtcttcctatactttaactggatgacgaaaattatcgtatatttctcaagtttatttggtggttttactggtttttagtattattctgcgaaaatgttggaaatactaacggaaaagcatataatgaaagtatattttgcatatagccacaaaaaaggatgagaaaatatgaacatagttcttttatcaagtatcgttgctgtttgtatggctgtcggtgcgatgtttattcgtttaaaagcagctaagaaacctgcaacattgaaaaaaattatacttccaccattttttatgagtacgggtgcattgatgtatgttttccctgaatttcgattaactccagcagaaatgttagaagcaattggtgtcggtttgattttctctatttttcttattaaaacatctaaatttgaaattagaggacaagagatttatttgaagcgttcaaaagcctttgttttcatattaattggattacttgtagtgcggattgtatttaaaacctacttaagtcaatctcttgatttaggacaacttagtggcatgttcttcttacttgcgtttgcgatgattgtgtcatggagaattgcaatgtatcgttcctttacgaaattacagaaggaaatggaaaaagaagatggtttttataatgaaaaagatatgaagctaacttaaaaactgtatatgtaccaaataaaaagacagcgtcaaaggcgctgtcttttttatcgaaaataatatgaagttactttgcgagtaaagatcgatagttagaataatcaatctttttttcttgtagtttttttattaaaaatttatgatcacgctttggtgtggcaatgatatatcccttaataatcaagtcttgtgtaatttgagaggcattttcttgtaatgcaagttccccgattttgccagcaatctttgattttgcaacatcacgaaatagttctggaacaggacttacaagctcttctaacaattgtttttgttcatcatcccataaatgtctcgttttatttatgtagtgttcttcccaatccaaaatggacatgccgtcttcttttggtaaacgttttaaaaattttctgaacataaagtatccaccgatagacataagccctaataaaataaccgtccataatacaatgaaccaactgaaccatccttcgagcacgcatatccccccttaatgatagcggttttcttttattcatattatatacagtgagattcatagaaagcaagaacgcttggtcattttgaccaagcgttatagtttaaacgaagtatagttgttcaacacataaattattattatcgtcttcaacatactcaataataagtgtgccaactttacgatctttatcttcagttgtgaaaatagagtaagaagtaaaacgtgtttttgataggccgcttatatgtgtaggtaaagaaatgtagtcgttatcgcggaagaattccatcagttcaatatcctcaaattcttttcggtcaacttgtttgtttgtatagcggcgttgaagttgttttaaagattcattccaagaaattgcttttgtgtcgtataccattgttctatctccttactgtatgtaattactaagaacatacgttctaatctagtatactctttttattagaaaagggaaagcaaaaaataatgtaagcttggatttccaagcttacattattgatgcgtccgtcataatctctatttttcattataagttagatatgaataagaaacaagatgatatatataatgttgagagttttcaagattctgtatattataggtgtactaaagtgtaagggaatgagaggtgtggcatacgtaatttcactgcaagggccgatggctagcggaaaaacaacattagcaaaaaggttagaaaagagagggtttcgagttatatatgaaaatccatatccaattgtagagaagcgaaaaaaattgaatttagatatgaattcaaaagtagggtttattatgaatcaaaaaatgtttatggaagcaaaaataaaggagtttcaaaatgtgaaagattcagtcgtaatttttgatcgcggaccagaagacattgagttctttacactcttttatccaacgattataggagaagagtgggatatagaaactgaattgaaagatgaattatataaattaagagcatgccgttcggatgtgattttttacttagatgttacgaaaaagaatgtatatgatagaaaaaataatgatagaacaagaaacagaagtacgtttgaggagcaatttaaattagtagaaactgaaaaagactggtataaaaaatttcctgtaacttatgtggacacgaatagattaacagtggacgatttagaggtatattttatggactggttaaaggagagagggctatgaaaaaaatacttttatttgtatactcaacatttgcagagtttgaaataacagtagcgacggcattgctgaaaaataaatatgaaatcattacagcgggcttaactaaagaattggttataagtgaaactggattgcaagtgcagccgcatatagaagtaagtgaagtacgtgtagatgagtatgaggggatacttattccaggtggagaagaaggacagttggaagatgcaaaacctcttttttcaatcattcgtcaatttcatgaacaagaaaaattagtggcggcaatttgtgctggaccgtatgcactagcaaaagcagggttatttaaagggattgcttatactgcgactatagattatcaaaaatttgattgttttccagtagaaaatttcgtgtatgaagaagttgtgaaacactcaaatatcattacagcacaagggcatgcatttgtaccatttggaatagcaattgcctcttattttggagtggcagacgaacataatacagatttttattgtggtaaaggcaatgtagtaatggagaaacttttacgagaaaacgtgtaaaagctagcaaatgctagcttttttctttttgacatcgataaatggctaacgtttttgggtcacgccatataccgttatgaagtgacaattcattttctacttcttcttttagccataccttcatttccgcgtgaaggtatgtattatcaggtatatttagcgacggaaacatgctagaaatatagtttacaatcggagtagcatgatgaaaaacgagagcattatgaataactgtttcttcaacagttggaaaaacagattgtaatatctctttaccgttttctaaacaaaatggagtgactgatgatgttgttttcggtaaatcaaatgcgtctaacatacggttacacatttcaactatacgaggtagtgtaacgctagaatttgttgtagctaaaagtgttccgccaggacgaattactttatggaatccttgaatcgttttttcaacatctttcacatggtataacatatgtcttgcaattattaggtcataacaatttgtttcgaaaggaagtttactagcatcccctcgtttccattctattaagttatttgttttagcagcttcagcaagcatagcttcggattgatcaaacccggttaatgggcctttatgaccatttgtttgtaaaagggaaaggaattttccactagcgcacccaacctctaatatattttcttccccttgaagttgtaaatgttcaatgacgatcttatctaaatctacgtgtttttcttcgtaatgtgtatgtgtgtcgatgcgtgtttgtaaatggttgctaacgttatactgacgttttacatcattcattttgtcacattccacctttgtgcaaaattgttggattgcatgtgttaatacatctgttttctttaaaccttcgtaatggagtgctgattcaaaccttttaagtaatttctcttcaattcgaaaatgaatatattttcgttttgtcactgaaatttcgcccctttgcatctgttagtgagactatagcatgcttggaaaaattgtgtaaatcatttgtgtacacaaaattatggggatgaaaaaaatgtttgaatatgattttaaactattgacgatttaaacgttttcatatattcttaaattaagtaatattcaaataattcaaaagaaatgagagagtcacatgcttcttcaaggaacacatcgaattggtcgtatggccatgctgttggcacttgcggatgagaatgaaagtcctgtattatccattccaaaaggttggaagtattgtacggggaaagtgggttcgatgaattcgcaaaaggttgtcgcagcaatggaaacagcggctaaaagcaaccaagttattgaaacagacgtttacagagaaacacatgcactttatcatgcaattatggaagctttgtacggagtgacgagaggtcaaattcagttagcagacgttcttcgtacagtaggacttcgttttgcgattgtgcgcggtacaccatacgacggaaaaaaagaaggcgaatgggttgctgttgcattatatggaacgattggtgcacctgtaaaaggatctgagcatgaggcgattggtttaggaattaatcacatatgatttgcccatagtctattagttagaagggggccttacttttttaggacagaagtctgtcttaaaaagataaggtccccttttgcctttttaaggaggaaaaatgatgattacgttaacaggacatacattgacagttgaagaaatgaagaggttattactggaaggagaaggtgtaacagcttgtccaactagtatgcaaaaggtagcggagtgccgcgaagtagttgagaaaattgtagaggacggaaaagtcgtttacggaattacaactggatttggaaagtttagtgatgtgcttatccaaaaagatgatgtaaaggcacttcaacataatttaattcagtcacatgcatgtgggattggtgatccattcccggaagaagtatcgcgtggaatgttaattttacgagcgaacacgatgcttaaaggagtatctggtgttaggccgcttgttgtaaatatgcttcttgagtttgtaaaccgtaaaattcatccagtcgttccgcaacaaggttcacttggtgcaagtggcgatttagcacctttatctcatcttgcgctcgtattattaggcgaaggtgaagtgttctataaggggaaacgcgttcatgcaatggttgctcttacagaagaagggcttgagccaattgaacttgaagcaaaagaaggtcttgcgttaattaatggtacgcaggcgatgacagcacaaggagttctttcttatatagaagcagaagcaacggcgtatcaagctgaactaattgcttcgatgacaattgaagggttacaaggcattattgatgcatttgatgaaaatgttcataaagcacgtggttataaagagcaagtggaagtagcgagcagaattcgtgacattcttcatgatagtaaattaacaacaaaacaaggagaactacgtgtacaggatgcctattcacttcgctgtatcccgcaagtacacggtgcttcttggcaagttttaaattatgtgaaagaaaaattagaaattgaaatgaatgcagcaacagataatccgcttatctttgatggtggggaaaaagtaatttcgggcgggaatttccatggtcaaccgattgcgtttgcgatggacttcttaaaagtaggaatggcagaacttgcaaatatttcggagcgccgtattgagcgtttagtgaatccgcaattaaatgatttaccaccatttttaagtccagaaccaggacttcagtctggtgcaatgattatgcaatatgctgcagcgtcactagtttctgaaaataaaacgttggcacatccggcgagtgtagattcaattccgtcttctgctaaccaagaagatcatgtaagtatgggaacaattgcttcacgccatgcacatcagattattcaaaatgcaagacgtgttctttctattgagatgatttgtgcgatgcaagcagcagaatatcgcggaattgaaaacatgagtacagtgacgaagagcttctaccatcaaggtcgtcagcaggtgccatctattaaaaatgaccgtatattctcaacagatattgaaaatattgcgcattggttaaaaacgaattattcgataaaagaaagattagatgtaaacgcagcactataaaatgagaaaagggagagattgaaatggaaaaagtacaacaaacaattcgcgcgccaagaggtacagagttacaaacgaaagggtgggtgcaagaagctgcacttcgtatgttaatgaacaatttagatcctgaagttgctgaaaaaccagaagaattagttgtatatggcggaattggccgtgcagctcgtaactgggaaagttatcaggcgattgtagattcattaaaaacgttagaaagcgatgaaacgttacttgttcaatcaggaaaaccagttgccatttttaaatcacatgcagatgcacctcgcgttctgttagcgaactcaaacttagtaccgaaatgggcaaactgggatcacttccgagaactagagaaaaaaggtcttatgatgtacggacaaatgacagctggtagctggatttacattggaacgcaagggattctacaaggaacatatgaaacatttggtgaagcagctcgtcaacatttcgatggttcattaaaaggtacattaacacttactgctggtttaggtggtatgggtggtgcacaacctcttgctgtaacgatgaacggcggtgttgtcattgctattgatgttgataagcgcagcatcgatcgtcgtattgaaaagagatactgtgatatgtatacagaatcattagaagaagcgttaacggttgcgaacgagtataaagagaagaaagaaccgatttctattggtttattaggaaatgcggcagaaattttaccagaactagtgaagcgcaatattacaccagacttagttacagatcaaacatctgctcatgatccattaaacggttatattccagtaggctacacgttagaagaagcagcgaaacttcgtgaagaagatccagaacgctacgtacaattatcaaaagaaagtatgacaaaacatgtggaagcaatgcttgctatgcaagaaaaaggcgcaattacatttgattacggaaataacattcgccaagttgctttcgatgaaggtttgaaaaatgcattcgatttcccaggattcgttccagcatttatccgtccattattctgcgaaggaaaaggaccattccgctgggtagcactttctggtgatccagaagatatttataaaacagacgaagtaattttacgtgagttcgctgataatgaacatttatgtaactggattcgtatggcacgtcaacaagttgaattccaagggcttccatcacgtatttgttggcttggttacggtgagcgagcgaaatttggtcgcatcattaatgaaatggttgcaaatggtgaattatcagcaccaatcgttatcggtcgtgaccatttagattgtggatcagtagcatctccaaatcgtgaaacagaagcgatgaaagatggtagtgatgcagtagctgactggccaattttaaatgcattaattaatagtgtaaacggtgcaagctgggtatctgttcaccacggtggtggcgttggtatgggttattcacttcatgcgggaatggttatcgttgcagatggaacagaagcagcagcaaaacgaattgagcgcgtattaacttctgaccctggtatgggtgttgttcgtcacgtggatgcagggtatgacttagctgtggaaactgcgaaagaaaaaggcgttaacattccgatgatgaaataaggaggagaaaacatgctggacactttactaataaatatcggtcaattactaacaatggatcaagaagatggcttgttaagacgggaagcgatgaacacgcttcctgttatcgaaaacggtgcggttggaattgaaaatggtgtaattactttcgttggaacagcggaagaagcgaaaggattacaagcgagagaagttattgattgcggcgggaaaatggtttctcctggtctcgttgacccgcatactcatcttgtatttggtggatctcgtgaaaatgaaatcgcactaaaactacaaggagttccgtacttagaaattttagaacaaggcggaggcatactttcaactgtaaatgcaacgaaacaggcgtcgaaagaagaacttgttcaaaaagcgaaattccatttagaccgtatgctatctttcggagttactactgtagaagcgaagagtggttacggattagatgatgagacggaatggaaacaattagaggcaacagcacaattacaaaaagagcatccgatcgatttagtttcaacatttttaggtgctcatgcagttccgaaagagtataaaggtagatcgaaagaatttttacaatggatgttagacctactaccagaaatgaaagagaagcaattagcggagttcgttgatattttctgtgaaacaggtgtgttctctgtagaagaatcaaaagaatttttattaaaagcgaaagagcttggctttgatgtgaaaattcatgcagatgaaatcgaccctcttggtggtgcggaagcagcggcagaaatcggtgcagcatcagcggaccatttagttggtgcttctgataaaggaattgaaatgcttgcaaattctaatacagtagcaactttattaccaggaacaactttctatttaaataaagaaagctttgctcgtggacgtaaaatgattgatgaaggtgttgcagttgcgttagctacagactttaacccaggtagctgtccaactgaaaatattcagcttattatgagcattgcgatgctaaaattgaaaatgacaccagaagaagtttggaatgccgtaacggttaactcatcatatgccattaaccgtggtgatgtagctgggaaaattagagttggtcgtaaggcagatttagttttatgggatgcttacaattatgcttacgtaccgtatcattacggcgtaagtcatgtgaatacagtatggaagaatggtaatattgcatatacaagaggtgaacaatcgtggagcacggccactatttaaagaaaaatgcaaagtttattgatcgtgaagtgacgaaatggagtgagatgattaaagattgggaggaaggtgtggaaatattcggtgctgccttaattggagcacccctttctaaaccgtctattagtcattcaggagcgagttttgcgccaaaaacaattcgtgcgatgttagatgcatatagcacatatgcaattacagaagaacacgatatgaaagaaagtgtcttatatgattgcggcgatattacgatgcatgtgacggatataaaagaaagtcataaacgaattgcgaaaacagttgggcatgtaacgaaagtaaacccgaacgtgataccaatcgttcttggcggtgaccactcgattagttttccgagtataacaggttttgcaaacagtaaaggaaaggtcggaattattcaatttgatgctcatcatgatttacgtaatttagatgatggaggcccgtcaaatggtacaccattccgtagtttactagaaaatgatgtcattactggaaaacaacttgttcaaattggaattcgtaatttttctaatgcacgtgcgtaccatgaatatgcaatagagcatggtgtaacagtgtatacaatgaaagacgtacgagagcgagaaataaaagatattatcacggaaagtattgaagtattaagaaatcaaggtgtgacttctatttatatttctcttgatatggatgtgctagaccaagcgtttgcaccaggttgtccagcaattgggcctggtgggatggatagtacgactttactagatgcgattgaattccttggtaaagaatcgctcgttcaagggatggatatagtagagattgatccaactcttgatttcagagatatgacgagtagagtagcagcgcaagtgattatgagttttcttttagcgagggaaacagttagcaaacaggttagtatatagacggaaaagtagatatttatttatgccttatcaaaaacacatcactacttaaatgtagtgatgtgtttttgtgttaaaggagaatgaatgtgtgtggaaccgttaatggaattgcgatttttataatgtattgtgtaaatttaatttcttgcttctgaagtattgactcgtaaaataattttatgataaaataaaaattttgctaaaaaactaaaagtatgttaagcttgagaaggttaccatatatggaggtggattatttgtttcaaattggtgataatattgtttatccaatgcagggagcaggtataattaaagccatagaagagaaggaaatctcaggagaaaaacaacagtattatgttataaaaatgtcggctagtaatatggaactaatgattccagcagggagaatattgaattcgaatatacgaccagttacggatataaccgcattagcacacataatggatatttttcaacatggggaatcagatagattacttacgtggaaacaaaggtataaattgaacactgataaaataaagacgggtaaaatgcaagaaggtgctgaagttgtgcgtgatttaatgcgtatacagaaagaaaaagcacttaatgcaagcgaaaagaagatgttagataacgcatatgaatttttgattagtgaactgggattaattgaaggtatcacagaaaatcagataaaaagcttttgttaaggttcattacaaataatgtattatatcccaaaaaagatcttgaattttttgggaacataattatagaaaatttatcatttcaaagacattcaactctttcaaaccacttttagagcattacctctattgttattactacaatcaaatccatttttattttttaatttcatttatgaatgttcgaagtttaattgaatacttcgataaaatagttacttgatttttgcaatcctgattcacactggcacggacgaggagccgtaaggatgaaagagaggtagggctttcattgttttaggtatataagttattatttttagaagaatactgaaccattttcacttctattgataaggtgttttttattaaagagataaacgaattgacagccatatatggtcaacaaaaaaggtttcctcctaaggaaacctttttaatattatttgcagtgttttgtttttgaatattcgaattttttgttataaagtcgtaaaaattgacgttactatctaaaagtaagtatgatgcgattatagtaagattttttaggggggaagaaaaatgacaagttcaagtaataaagcagcgagtatttatgaaggaacaaatgtaaatgctgggggattttttgaaaacgttgaagaaacaaagttgtttgatccaattcaagttggagcttggtctcttcgtaatcgtatagtgatggcaccgatgacaagatgctttgcagataatgagactggagtagttggtgctgatgtagtggagtactacaggcgcgacacgtttctctataagcgtttagacgtgaagtgagagtgttgctgaaaataagccaatgactcctgataagccaatggaaaaggaagacatgaagcctgataaaccaatgactcctgataaaccaatggaaaaggaagacatgaaacctgataaaccaatgactcctgataagcctatggatcgggagggagaaatgaaaaaagataatgatatgaaacaagataagccaatgactccttgggaagaaatgaaaccaagtgacgaggggagtgaactttgttggcatgtagtgaatggaaaatgcggataaagaaattttttatagtagtacctgtattacttgggattttgtttgtaggtgatacaagtgcatttgctcaaggtaaagatgtattaagtggaagagtaggtaaagctcaatatggtagttcatatataacttcattaactgatggaaatttacaaactagtgatactctttctaatggtgaggtcataattgatttagcttctcctgttagagtttcagggtttaggtttactaaagttggtggctctagtaatagaatggatgtttatttttatacagagggtgctactttaaagcgggaatatagaaatactgatagtggttatctacaagctgttgatattaaaggtgttaaaaaaattggattgaaaaatatgagcaatggagattattttacacttgctgaagttaatttatatgagtatgaatctgttcctccatctgatattacggatttaaaagaaaatattaaacatgattcagttgaatttacttataaaaatccgaagtcgaattttagtcatttaagaatttatcgtgatggacaagtgcttgctagtgatgtgaaagaagaaaaattcactgataaaggtttaactcctgaaacggagcatacttataaatttgtttcggtttctcctgatggtcttgaatcaaaaggtatagagaaaaagataaagacagtgaaagagcctttgccagatgaaataaaagacttacaggaagatgaaataactcatacttatgtgaaatttagttataagtttcctaaaaataattttgatcatgtgaaaatttatcgtgatgataaagtgattgcggataatgtgaatgttgaggaatttattgataaaggtttaaaaggaagtatggaatatacttataaatttgtttctgtttcttctactggtcttgaatcaaatggaattgtgaagaaagtaaagactgatgaagaacctaatcttaataagccttttaaaccttctaattttgatgttacgccaaaagatggctcgttagttgtaaatctattaagtcaaaatttaggcgttccaattaagggttatcacatttttattgatggtgtaaaagttaatgattcacttgttacaagtcgttcttatgctgtgaaaggtttacagaatggtcaaacttatggtgtacagattaaggcggtttctaagtggaatattgaaagtgatttaagcaatgttgttaatggaattcctaaagtaccagttattcctgaggttacttttagttttggtttaggtgctttagttgatgggataacaaattggttcctggggatatggccgattgtggcatttagtattgctattccgttagcatttattgttgcgtttaatacgaaaaagttgtttatgaggtaggggaattaactgttaaaaagattataaaagtctactaattgttagtagactttcgtttgataattaaatcttcaattgcttcatctaataatttactcattggaatttttgttttatctgatagttcttttagttgtttgtacaattcaatgcggacggcatttgataatgcttttcttgtttttaatccacgattttcgctcatattcatcacctctaaacaaattatagaatacatccaatcgacttgcaattgaatgtagttgaatgtacaatgaatttaggaggtgataaataatgatactagtgaaaaaagttcgtcttaaaccaaatagagaacaagaaatgcaattatggaaatctactggaatagccagatgggcttataattgggcattatccagacaagaagaaaattataaacaaggtggaaaatttatatctgatggtactcttcgtaaagagttgacacaattaaaacaaactgaagaatatgcttggttgtatgatgtatctaataatgttacaaaacaagctgtgaaagatttatgtgaagcgtataaacgtttttttaaaggggttgtagataaaccgagatttaagagtcgtagacattctaaaccatctttttataatgataacgtgaaattaaaagttatgaaaaatatggttcttattggaaaagtaggttgggtgaaaacatctgaatgtataccagttgttaataaatattcaaatcctcgtattagtttcgacggaaagtattggtacttagctgttggaattgaacaagagattattcatcaagagttaacaaatgcaagtatagggatagatgtcggtattaaagaacttgctttttgttctaatggaatgaaattcaaaaatatcaataaaacaaaggtagtaaaacaggtagagaaacgccttcgtagattgcaacgtcaagtttctcgtaaatatgaaataaataaggagggaagctgtttcgtcaaaacaagcaatattataaaacttgaaaagaagatacaacatttacatagacgtttgacaaatatccgagataatcatattcatcaagtgacttgtgcaatcgtgaaaaccaagccttgcagagttgttatggaaacgttgaatatcaagggtatgatgaaaaataaacacttatcaaaagcgatcgcacaacaaaaattatatgattttaaaatgaaaatgaagtataaatgtgagaaatacggaattgaatttgtagaagctgataagtggttcccttcgtctaaacagtgttcaaattgtggtgaagttaataaacatttaacgctatccgataggacgtatcattgtaaatgtgggcatcatatagacagggatttaaatgcatctattaatttgtcacgctatcaattagtaaattaacactaaaacgttattgctaatatgtaggattcgttgtatccgaatttacgcccttggagtgttatgtcaaacgaaagtagcttcggcaaaatcggacacgtagagtagggaagtaaacagactttataaagttttataaggttttggcaacggtgcttagtttgatacaaccagttacaactaaggatttaatacaatttctacagtatgcgttccatgctggggaagacgtattatttctagcgtttgtattaatgattacattctctgttgctataagcattagaaggattatggtgggttataagcaatcatgatggagaagtttgttaagttcttaaaaggtggatttgaagcggttataaagtcgttaaaaacgtttattgattttttagctacaccatttcaatatctactggattttttaaaaggaatcttttatttcatagaaaagctgtttcaagttgtagtagcaattataaaattattcgttgccttgtttcagtttttaggtgctgtaatagcgggattctttaaaactttatttctatgggtacagcctaattttgatggtgggaatgtatcgtttcctagtgcatcaatgaaaggatttaaagtggctactgatatattacttcctactggattacttacagttattccggctgtggtcacatgttttatttggtacttgtttgttaaaaagctcatggatctattcagaggtggtcatcattaatgaatgcgttaattgatacaatatttaatcctgttcttggttggcttgcacaaatggcaaagtatttaagtgatttaagcgtaccggcaagccgtcctttgcgaattagtgattaccttggagtatttgcttatttatacggttggacaaccgtcataacgacgttattcgctttagttttcgtatattttgtttgttacatcatcatgacttacagtagtttgtttattcgatttaaagatacagtgaaatggtggtaatgatattgaatattgtagggcaagcaattttattaatattttttacgacagttgtttcttggatggtaatagatacattgaatttctttagagggatagaagaatgatttatgcaattttgggattcattatttggattttgattttgatttgtgaagcaacatcgggaaaaggagagttaaaataatgcaggcttttaatgcgatgtttgagttatcaagtgcagtttgtttatctatatttctttttatagttttaccatatatgtttttcaaaaataaaatgtcaaagtgataaaaacgaatgttaaatattaattagtttatatagttcgttaaaaggattcaaaatgtcatggcagcgggactagatccaagaggttttgaaatgaaaaaacgaacgttttggaggtttttataaatgttagctaaaacaaaacgaaaagtacagccacaatttgaagggcatagagcgttgattattaaggaagaaggaacatgtgtagttgaacaggtcatatcgtttgattcggagattttagaaacgagtacagccatgttaccacgtgaaaatgaattgagattacttgatgataatcatggttatgtgtatcacatttataacctagaaaagcccgcaagaattgaagcggaaaatttgaaaatgttacgtcgttctagtgcgttaaaggggatttttgattttgatacagggaagaaaccttttgacattattggttttatgccttgggtaattattgtattgctagctatttttaaataatggggtggagtaaatgagtgttcaggaaatgttaacgaaagatattttagaagaagaaggttcaaacgaaacgattgagactgttcaactgtttcaattcatgaaaaaacatgctgtgccattaacaaagaaacaacaaatggctatgttattgcttaatgaaaatggattatcggatatttccttatatattgcgggaatgaaagaagaagtattgccattaagtgaatatcacaagacacttgagaaattaacgctttcggaccgaattaaaggtaatgctaaattaagtcatttactgaaagcaaatgcgaatccttcattatcattgtcagcaaatagcgcaaaagttgttaaagggaatgagttagcatgaacataatggtttttgagggctttctcggtagcggtaaaacgtttggtatgagtttgtttgcaaaacactatgaagaaaagagtggctgtgtattgtacagtaattacggtttaattgggtctaaaccatttgtaactttagatacgtttcatgatattgcaaaagagaaatctagtatcttaaatctcgatgaagcgcatattgatcttgatgctagaagtttttcaagtaactcggtaaagttcttttctcaattgtcttattaccttagaaaactacgttgtacgttgtttattacctcaccatcatttgatgatttagattcacgtataagaggtattacaaacgttctcgttagggtatcgaatgataaaaactatttttattacaaaatgtatgatgttcaatctaaacgatatttaaaaacaatgcgtattcaaaagaagaaagcttttgctattggttcaaaagtttatgatacgacagcaatggtttctccagtacaagttccagataaacgacaagacttcatggaatttttagaagcgttgaagtcgaccgccgaagagtacggacgccagtacaagcattcagcgtaagctgtatgcgcggtgcaggcgggaggacttcataagattatataaattaaataaggaaggtacgttatagatgggaattttaaagaagaaaaaatttagagaagaagtgaaaagaataaataaagcacatggagaaatgagagaatttctagatttgctcatggatcgctacggattagatgaagaagaagtaaaaaattgtgaagtaattaaacatcattttgataatttagatttgatgtttagtcaaatggcaaaataatgttcgtgatttaggtgtgaaatgtaacggcagccgtgcatattttccaggggcttttaatgaaaatacgaacattaagtatgaggtgaagagatttgatacatgtagattggttgaaaactatggcgagagacggattattttatggttcattcattgctgtaattgttttcttgctaaattggtttacgggttaggttttaaaggtcttccttcgcttttgaggttggagattggctggggtgtggggctagccccgcatagcgtaatgggtaaatagaataaaagaaaatataaaggtcggtagtacaagcgtttaggctcgtataatggataggcaagttgatagttaaatatattcacttttgagtttatcgacttggcgatgaagacaaacgagcctaaaaaagttatgcaagaatgtagcgtagcggaaaaggtggagattttatgaagcagagcgtaagaaaatactacctgtttcttgtttaaccttttagcaaatacagatagagggttgttttgatggagaatgttattgttacgttgtttggtactctagggatttgtttcttgtttaaaggcatgctagatactttaaaagaagggtgatatttgtggatttgcctgtttgtaatgaaaaagaggtaactgttttatctaagacattgaaatatttgagaagtgatcaatctaatcaagttaaggtacataaagagtatttagaggacagaggttggatttttgatgatttaacttatatagatagcaatatctatgtagtttataaaaaagaggttgtaaagcgaaataaggcgttttaaggggtgtatatatgtttaaaaagttttatcgtgaatatatccatgtattgtttaatattgttgcgatgtttttttattttagttggtgtttagttggtgctgaatttaatttattaactctaatagcaattggaattgccctttttatttttgttaagtatgtatctatggataagaaatttgttaatgaaaatatagataaattaaaagacaaaaagatgatttttaggaaatatgctataagtggtgaagatattggatatgcagtttttacaaattttttattgtttattttgtatttaggaatatccgtatattttaagcctttaagtgtaatggctttattatttgcttttattgttaatgttagttttcttatgttaactcttagaataatgagtagattaagtttaaagaatagtaaagtttaagaggtgtatatatgtttgctaagtattatagccaagatgatgaatttatgtcgccacttcaatttatagctttgggtggtattatgagttttcttattaaatttggttgtatttcgcctagtgtgaatatgttaacgttatttgttactttcgttacttgtattggattatgttatttttttctacttttaataacaaagtatttttatagatttcttgctaaacatcgtgataatttacatgtttatttatgtaataagtacaatgaaaaaatagcaaatagaatcggtttatgtattggtttagtttatattgtaggggtgttagttatatgtttgctgatttaaagttgaattttaaattttggttaactgtagtttttgatatatgtatgcttgcaatgatctgtgttgttacaacaaagtatgtatctgatatatatagtgatttgtttattttcacgacaggatttttaatactattaatttggtattctgttagagtgtatttgatagatttaatcagaaaaaaacctatcaataattaaaatttaatatttttttattgaaaaaccatatgtttttatttacaaaccatatggtttttgttatattaaatttagttaattgataggaggttgtttttatgacagttaaagaaaagaaaaaaacttgggcatttacatttactgaaagtgaaattcagataatagatgaaattgtagatatagagaatgatagaagacattcaattgctagagaacataatttaccgtttaaaaaatataatcgttctacatttgtgcttgcaatgattgaagaaaagaaacgtaagtatcaagagcaaggagaaatttaatggaaattgttttaggtgttagtgcgtttggtttgtatatttcgtttttaatatttttatattggatggcattagattttttagcttggttatataaaaagatttaataaaatcgttattttattggttttctcttaacttgttaatattaataggggataaacgctcacttttttatttctacttttgaggaggtggttttgtggtcggttcttctgatttatctcgcattgtttcctcgagtcttggccagtttattcttgtttgttgtactgattcttctgtccatctgggtctcctagttccttatgatttggctaagaaaacttctttttttacagttgacaatgacatgggattttcattggatgatttaggtgttcatagtgatcagatgttatttatttttacacttgaatctgtattgatatctattccttttgatcaagttgatagagttataacttttactggttcttgtatagatcattataataaattttatgtagaacctaatgaatttttgaatgaattcaaattatatatgtctgtttaattattttacttggaaaggtgtttgtttatggctttagacgtttctaagtgtggcaaaaagacagcacatctgaagtctaaagaaactggtaagcattatgctaaggctttgacttgtaataaattagaatgtcctagatgtcagccagtaattgccgcacatatacaaaagatggttcgtttttattctcaacgtgaacgtttgtttttctttaatactcttacttcgactgatggtattaaggatttggataagatttttagtaaaattagaaatgagttgaattttaattttactttggaaggatatatgaaacgtaagaaggttagttatgaaaaagctttgaaatggtatgagaagaagaaagaaaaaacaattctttctgatgttgaagtagaattgtttagaatttctcgttatgatgctgttatttctgttgctaagcgtaaaaaagtttattataagaatttaagttctgatgataaagctaagtttaaggatatatatagtgatttgatttatgaaaggtttctttgtatttatgattgtaagtgtaaagatcagtctttaagagatgaattatataataatatttctaagcgttttgtagaaaatgaatttgttgattttaaatttattagagttttagagtttcataagagtggacaacctcattatcactttttgagtaatcgttatgtacctcatactttattaaagaagcttactgttgaaggtgtgagtgaagtttatgataacacttatattgtagaagatgctttgaggaaaaatcctgatttaacttatgattctgttgatactgatattgtttctaattatgtttcgaaaatcactaattatgttacaaaggatacaatagatacttttttaactatgcaaggtgatggtgatatttctaaaaagcttattagttctagtaattctattaagatttttaaagagaaagatgaaaaggatttaaaatatattaaattgggtgtttttgattatcaattaaattctagtagttatgagattcctttaggttttgagaatagtgctgaagattttataagggtcaattcttatatgaatgctgatccacatgcagttaggttaagtcagcttgttaaggaattagatttgtctgatgaaattaagtatagctatatgattcacgaaagattattagctatatcttcagttgattttatgatagagagacttggtaattatcgtactgaaggtttaacttttgatcaagtaaggttacttaaatcatttattgataatcgtattaccttgcttttaggacgagctggaacgggtaagacatatactcttgttaatttattgaagcgtttgaatcctaatccaactaaaactattatttgtacttatactggaaaggcttctagtaggattagagagttattaagagagcaagatttagaaggttataaaccaatgactatacataaagcttgcgcttcgaattttagttctaatttttttagaaatgaacataacgtaattgattgcgcttatttgattattgatgaagtttctatgattccacgtgaaattttagcgaagttgttacaggctgttccgagtcatgtgaagattatttttgcgggtgatgatgcacaattacctcctgtgaatgatacaagtattattcctgaattagaggcgttagagtttgttaatactattcgtttaacacaagtatttagaagtggtgatgctgtccttaaacaggcttataatgtattagatcataaattgattaattatgacttgtatgatgaaaatatggaagagttggtgcagagacttgtttttgaaggctatcaaattttaactaatacaaggaaattagctaaagatataaatttgattgttcaagctaaaaagaaagatattacactttgttttaatgattttaagtatgatttgaatgatcgtgtcatgattattgctaatagttcagcaagaaatgttagtaatggtgatactggaagaattgtaaattatgatgatcaaggtgtttgtgttcggttggatctagaagatagagatgtattttacaaatatgaagatactgaagaaattgtaccggcttatgcatttacagttcataaatctcaaggtagcgagtatgagaatgttgcagtatttgtagatagtcagccgaaattgaatacaaataatttattgtacacagggattacaagagcgaagaaaagtataaaggtttatgttcctaatgaaatggttttaactaatatgattaatacagttcctgagcctgtatctaatgtgacactaaataatgtgtttgacgtagttcatggagttattaaaatggatgagaaaataaaaaaagaatcttctcattagaaaacaagaagattcgtgtgagttttcgaattgactagagacgaagactcataagactaaattgattgattgtacttgtattatacaaactttataaagaaacgtctagaattaaagtcagatttatatctgacttttttgtttgttgtatatgaaaaaaatcagaataaaatcagaaatgtatatgaataaaatatgatataattcagatatagactaaaaaaggagaatgattgattgtgaagattgttgaaattattgacttgattaatagttctatgactatgccagatatggctaaaaaattaggtgtaagtaaggatactttgcgtaggcgattaaattcagttgggtatgagtatgataattctaagaaaaaaactttatatgttggggaagagtcagaaaaaaatcagatagacaacagattgttttctgatttaaataagaaagataacagaaatgaattgaaagttatcagaaaaaaatcagcagaaatacagaatgaagaaaaacatgttgtaaatgaattcagaaatgagtcagaaaaaaatcagagtaaagaaaaagaagttttaaataaagttagaaaaaaatcagaaaaaaatcagaatgactttactgaatctgaaattttagctttgaaagatttattacatatagtaaaaagtgatgaggctaaattgtttttagagttggcttcacttcctgaatcaaaggaaagtaaaaagagtagtattgttattagtaaagaaatacatgaacaatttgaagagttctcaaaacagtttgcaggtaaaaggatttcaaagttttcattaattgaattagctttgtatgaatttatgaagaagtatagttgagagtttagactctcaactttttttatgttcggttttttatgagtccatttttgtttatagtagacatgatggtttttttagaaaaggagtaagaaaaaagtgggcagacatcgtattgatccagacgaaaaaaaggtgaaattaaatgtttctataaagaagaaatatgttgatttagtaaagcaacaagaaaatcaatctgaatttgtagaaaatgctattgtagaacatttaaaaaagcacaaaaagatttaaaaaattttttttaaaatttcttcttgtattctgtccctttttttgctataatcagaacgtaaaatctggactcgaaaatttgttcgtttttatgttcgcaaaattagaatatggaggtattataatgccaatagttaaaattgaaggcgtatttatgggcgcaagtatggttgaaaaagagtttgaagggaataaaaaaacaactgtagttgttgatttgtaccaaaaaggtgaaaaagggaatgagacggttagggtttctagtaaagaagtaacgttgttcccaacgatttctggtggctacaaattaggtgatgagtttaagtgtctagcatctgtaagtgcatataagaataatgcatattacaatttgcaacagattgttaagtagtacgaggacttataagactgaagtgattgtgtgattttatgttagataaaatcgatttaaacgacttgtacaaaactatttcggaaatcatgccaaactacttagtacagactaagaacggtagttttgcagttttccagacacttacctatggtgatatgttaattagtttcttgctattactaatcttgttggtgttaacattcaactggatttggagtgctttgcgatgattgaatttaatttagaaaatttattaaaccaatattctctatttggactcccatttttgttaatcattgttttcacattgcttaaagattggcggtttgataaatgaatgatttagcctttttagatatgatgtattggttttttatgaacaattcagttgtattatactcgttaggttttataacctttctagtattcgtaataatgatgttcaccaccgtcaaagcttggggtgatggctattagttttagcatggacgtgggaagaatcttgcagtatgccttcaacatgtttagttcagtgttaccagtgatttatttattcattggtggggcgtttgctatctactgtatcggtaaagtgtataacacgtttagaacttaggagttgataacaatgcctgaatttggtttcagaccatcgatgtctcaattattcggtaatttcaatatgaactggaatacaatgacgccattgttagttgttttgtttgggatactgtttggatttttcgtagcgcatttagtaaaagacaaatttgatgattgattaattaggaggaatttattttggaaatgccaaaaattacattgacttataatcttgcagacgttgctaacggtttgactaactggttaggagcatattggccaattatcgcattctctgtagcgattccattaacgttcttagtggcgtttaacactaaagacctatttactcgttaatcatcaaataatcactccttaaatagcaagaagttaactataaatttaataaaacaattaaatagctgggctaataacctagctatttttgttaggaaggattgatatgaaaaagctagccataatttttttatgtgcattttgtattgttagccatacgatccctgtgtttgctgattcacctagttttcaattggtaggtagtaaaaatgtaacaatcgaaaataatgggatagttaatggtaaatacaatttaattattaaagttaacaatatgaaagatgtatatagttttcagttatcggaattgatgcttgttaatgattgctcgttccatgttggtaaatcaaagtggactcgtccagaacaagaaaaaaacgagttccctattaactggaatcagaatggtacatacgcattttacatttttcataatggtaaagttttaggctatgcacgttttaagcttaaaggatttaaagaaaacggtggcggtggaggagaaactgtatattggggcaaaggtgctaaatactacgatttacctgaaattgaaaagcctaatcctgaggactatgcggattatgataataagaatgacggagtttgtacaaatgaaaaaattccagatgataaaccacaaggcagcggtgatatagatgaatcaaaagaagataataaaccacctgtagatggtggcggtggttctgataaagctgttaaagaagttttagaaaagattgttagtgcagtaaatgaaatttcaaagaatacaggtgaaacggctaaaaatacaggtgagacagcaaagaatacaggtgagattaaaaagaacaccgatgaaatagcaaagaacacaaaagaaattgcggatgctgttaaggatattagggataatttgaagattcctgacgatatggatttgtcgattaaacctgttctacctgaggacattaagcctgataaacctaaacaacctgataagccttttgaagacaaacaagagcactttaaagagggtgaacaagagaaaccacctgacaaacttcctgttgctcctgagcccgctgaatgttggggggatgtttgtaaagataaagataatcagaaagaagaagatatgaagaaagaaaaagatatggataaagaagaaccaatgaagcctgataaaccaatggaaaaggaagacatgaaaccagataagccaatgactcctgataagccaatggaaaaggaagacatgaagcctgatattagtttgtctagcatctaaaataaaaattgacgtttcacgttgtttgtttcgtttagttttcaaagttcaatatcgcgtttcagcgacttttataatttaacacttctcgttaaatctgtcaacagtttttttctttcgttgctgacgacgcttattaatttaccatattaatcatttaatagtcaacactttttaaaaaaatgccaaaataattttatcttggcatgatataaagcttaataatcactaatgctgccacacccggtaagcctaacaaactcgttattgctgctgtccccatgttaatcgggatatgaaaatcaaaatatgtccctacaacatttacgataaaaagcaatgctattcctaaagtaacatgaaaaatcaccttacctataaaacgtaatggcttagaggcaacaccaaaaacaagaaaaataaatactaaagtaagaatgccaacaataataattgtagaattcattttttcctccttatgaatgacctatacatctatttgtatgggacaagacaataaaaaagaacagttatcatatgcagcatctcttttatataaactaaataaaacgatacctcagcatttaacaaataaaataaaaaggcctgcttagaaagcagaaccttttaccattgttccatttttacaggacgacgctttgcttctttcaacaaaaagaaatatttcgcctctgctattttcaaagaacaaatgacatcttgagacggttctacactttgttcgaccattctcttctgacgtaaccactcattcttcactttttccaaaagtacaattaacttatcgtcatactctttacgcaatttaccctttttttgaaagaacattttcgtttctcctcttatacttctctgcgaccttctaacgctttggataatgtcacttcatctgcatattctaaatctccaccaactggcagaccatgtgcaatacgagttactttaatgcctgtaggttttaagaggcgggagatatacatcgctgtagcttccccttcaatattagggtttgttgctaatatcacttcttgtaccgtttcatcatgtagtcgctttaagagttgcgggatattaatgtcttccggtccaattccctccataggagaaatcgcaccacgtaacacatgatatacaccttgatactctttcattttttccatcgcgattacatctttcggttcttgtacgacacaaacaactgattgatctcgatgtgaatcattacaaatataacaaggatcacgatcagtaatatgtccgcatacagaacagtacgctaaatctcgcttcgcatttacaagtgctttcgcgaaacctaacacatcatcttctttcatatctaatacgaaaaatgccaatcgaaccgctgttttcggtccgatacctggcaacttcataaaactatcgattagttttgatattggttctggataatgcatgtatcaatatcctcctagaacattccacctggtaagtttaagccttttgtaaatttacccattgtagagtttgaaagctcatcagcctttttaagtgcatcatttgttgcagctaatactaagtcttgtagcatttcgatatcttctggatctacaacttcttctttaatcttcacttcaagaatttgcttgtgaccatttgcgataactgtaatcattccgccgccagctgtaccttcaactgttttttcaccaagctcttcttgtgctttcgccatgtccttttgcatcttttgcatttgtttcatcatgttattcatatttcccattccgccacgcatcataattaattcctcctaattattattactcttttatttcaatgagttcttgccctactaatttcactgcctcttctataagaggatcttcctttttctctgggctttcttcagactctccaccttcacgttgtaaaaagtcttcacggattttaccccattcactttttggaatggcaatcatatttaaccttttacttagcaattcaaataaagcttgttctactgtatccatagcttctcgattttcgctcgccatcttacagtgaatctcatattgaaatgctaaaacgtaagtgtcatctgaagctgccactggttcgctattttctagtaaaacagcaaacgctactttgttatatgatttgagtcttcctaacaactcaccccatacagcttttaattgttctaaatcttgacgcttcgcttgttttaatacttcatttacacgtccgacaggaatcttcatacttcctgttcttaccggctttggtgttgcacgtgtctctcttacttcctgttgtacaccagctggcacaccgttctttttaacttgctctaactctttctccagttgctgcatcctgttcataattgcttgcaaacgatctgtaccatttgcttgcatcataaactgttgacacaattgcaccataacaacttctaagaaaatacgcggatgatttgtccacttcatttcctgttgtcccttactaagggtatgaataatctcatagatcacttccggttgcatttcttcactcaacttacggaattgatcatctacaattactcgttccaacatatgttctagttgcggtgaagtttgatataaaagcatatcacgataatagtaaatgaaatcctccataaaacgaactggatccttccctttactcatcatttcatctatgatttgcaatgctcttgatacatcattttcacgtatgcattctactaaattgcctaagtattgctgagaaacagatcctgttacggccaatacatcttctgtcgtaacggtctcatcactataagatatagcctgatcaataagactaagtgcgtcacgcataccaccttcagcagcacgcgcaacaatttgtaatgcctcatcttccacttgcgtaccttcatttgtcacgaccgttgataatctctcaacaatatcattcactgatatttttcggaattcaaaacgctgacaacgtgaaataattgtaggcgggatcttatgaggttctgttgtcgccaaaataaagataacatgtcctggcggctcttctaaggtttttaaaagcgcattgaatgcacccatagaaagcatgtgaacttcatcaataatgtatactttatattctacagcacttggagcatattttactttatctctaatatctcgaatttcatctacaccgttatttgaagccgcatcaatttctaatacatctgaaatggatccttgtgtaattcctaaacaagaaggacattcattacaaggttcagctaccggagcatgttcacagttaattgcttttgcaaatacttttgcaattgtcgtttttcctgttcccctcgggccagaaaataaataagcatgtgaaactttctcttgaagaagggcattttgcaacgtttttgtcacgtgcttttgaccgactacatcttcgaacttttgcggtctccatgttcggtataacgcttggtatgacacgaaaatacggcctccctcaaaggttattatctcatttattataacccattctgtttatagattccaaaagttattttctatacaaaaaactcacctttgtattaaggtgagttttgtatacatatataactgccgtgcaccctccgtcgattacgtaccataagcgttactcaagcagttagctcggttcaggcactcctgcggcacacgagaagacccgcttattgctgcttccttccggacctgacaaggttcacggggtcccgttgcgcaggacccaaacgtcaacaccacttacttaaggcagaccttacagcaacataacctcgagaggggattcggcctcgctagagcggattgcgagtatagggcaccgctacctccccgcttagcacggcaaagttaaaaccaatattcggttgccttcattaaaggcattatcagtataacttgtttctttataaaatgcaaatacgttagttcccagtattcttctctaatttttttattgcttttctttttttacgaagctctctaaaaaagcttgttaacaacgtaccgcattcttcctctaatacaccagatactacttcacattgatgattgaagcgttcatccgttaaaagattcatcaatgtccctgcacatccgcccttcggatcacttgcaccatatacaactcgcttcactcgtgataaaacaattccacctgcacacattggacaaggttctaatgttacatacagtgttgcatcttctaaacgccatgtccctaattttttacacgcctcatctatcgctagcaactcagcatgagctattgatctctgctcagtttcccttaaattatgggcaacactaattacctcaccatctaacactataactgctccaattggtacttcctgtatttcctctgcctttttagcttcttctatcgctaattgcataaaataaatatcttgatcttgttccataacatagtcctttcattacaaataaagtacacttatttccatttactacacaggggataacttttacaaattcaatccaccctaaaagaaaaaagagaggggattacatatgaaaaataccgccttgctcattatcgatatgattaatgactttcaattttcccacggacccattctagctaaaaaatgtgaaattataacaaaccctattttacaattaaagaaaaaaatgaaatccttcggctgtcctataatttacgttaatgaccattatcaactgtggagatctgatatcgaccaacttattactcattgtacaaatgaatatagcgaaaacataatccataagattgctccaagttctgatgattacatttttattaaaccacattattccgctttttatgaaacacctttaaattcattactaggttatttaaaaatagaaaatctaatattaacaggggttgccggaaatatatgtatcctatttacagctaatgatgctcatatgagaaattatacattgtatgtaccagaggattgtatcgcctctaacaacgaccaagataatatacatgctttaaaaataatggaaactacattgaaagcaactataacatcatcaaccaaaataaaatttaattaatacatatatctattttctaactttttatatcaaattaacccgctcgcttccctcttgtgctacaataattctgttttgtgtttttagtagtcacggtaaatcactgattgaaaggaggaaacagcgtgaccggagtaccatttatcacggttgaaggaccaattggtgttggaaaaacttcacttgcgaaggaaatttcaactcacatgcaactccacttactaaaagagattgttgatgaaaatccctttttaggaaagttctatgaagacatcgacgaatggagttttcaaacagagatgttctttctttgtaatagatacaaacaattagaagacattaacataaagtatttgaatcaaaggaaaccagtagtagcggattaccatatctttaaaaatttaatttttgcatcccgcacattaaaagactcccaatatgacaaatacatgcaaatttatcgtatccttacacaagatatgcctgtgccaaatgtcattgtttatttaacagctagcctagaaacattgcaaaaacgaatcgccatgcgcggaagagaatttgaaaaaaacatggatccaaattacttactacagctcacaaaagattatgaaacagcaatggatgcttttaaaaaagatcatccggaaataccagtattgaaatttaatggagacgatatggattttgtaaaaaatcctgatgatttaaacgtcatcctatctgcccttcaaaatactctcttaaaggagtcgaaataataatgaatttaaggcaaaaatatgatatacccaatgacgcagtaatcactatcgccggaacggtaggtgtgggtaaatcaactatgacaactgcattagctaatgctttaggttatcgcacatcatttgaaaaagtagattccaatccatatttggacaagttctatgcggacttcactcgttggagcttccacctacaagtgtactttttagcagaacgatttaaggaacaaaaaagaatttttgaatatggtggcagttttgttcaagatcgttccatttacgaagacactggaattttcgcaaagatgcatcatgaaaaaggaacaatgacggaaactgattatgaaacatacaaaggtttatttgacgctatggtcatgactccttacttccgtcatccagacttattaatttacttagaaggttctttcgatgatattgtcgatcgtattcaagaacgcgggcgcccaatggaacagcaaacaccaattgagtactggaaagaaatgcatggacgttatgaaaactggattaacaactttaattcatgccctgtattacgcttaaatattaatgagtacgatattttaaaagatggtgattcaatcgaaccaatcattaaaaaaattggccattttttaaaacaaacacgtaaacttgtaaaataaaaaacccgtgcatatgcacgggttttcctattaaattacttcttctttgttggagcaataatttcactctcaggttttcctgcgttaatgcgctgacgaaccgtacttgtactaatatcgtatgcttcagcaatctctttaacagtcatttctttcccgttaattactgccgttaatactttacctgtacgttttggagccgccgctttctttacagctgcttttttaacttgttttggcgcctctactttactcgtagcttgttttacatcacaagtacaaccacaaagtttacggaatgtatcatcactaataatgcgtgatacgtttgcaccactgtttaaaattctattgttcttacagacaggacattgtacataatataaagtttttccatctaaaggaaacgtttgtataataagatccatgttgactcctttcatatctatgaagataatcatcggaatatgagtgtgtaataaggacaaaattaccttacaccatactttatgattggttttaaaataaaaactcgttacgtgttggtaacgagttctccaatctccacttatatgcgctgttgtcaattatatctggaggaggtagagggattcgaacccccgcgcgactctcgccgcctgtcggttttcaagaccgatcccttcagccagacttgggtatacctccatattgacatcaaatataatatcaaaagaaaaacagttagtcaaccctactaaaataaattatgaggaaaggaaaattttacttttcccttcctacattacagtactgacaacgctcataattaccaatcactcataccgatgaatgtttaaatttacttaataactgtttttcctcccatataagggcgaagaacttctggaattataattgtaccatcttcttgttggtagttctctaaaatagctgcaaccgtacgtccgatcgcaagaccagatccatttaatgtatgaacatgttctggttttccatttggctcacggcggaaacggatatttgcacgtctcgcttggaaagcttcaaaattactacaagaagaaatttcacgatatgtgccatagcttggaatccatacttcaatatcgtatttcttcgctgctgtaaatcctaaatcgcctgtgcacatgctcataacgcgatatggcaactctaataattgtaacacgcgttctgcatcatttgttaatttttctaattcttcataagaatcttctggttttacgaacttcacaagctctactttattgaactgatgctggcgaattaaaccacgtgtatcacgaccagctgaacctgcttcagaacggaagcaagagctaaatgcagcatatcttataggcaattgctctttatttaaaatctcatcacgatgcatattcgttacaggtacttcagctgttggaattaagaagtaatcttcactttcaatacggaatgcatcttcttcaaactttggaagttgtcctgttcccgtcatacttgcacggtttaccatatatggaggtaatacttcttcatatccatgctcatcagtatgaagatcaagcataaagctaattaaagcacgctctaatcttgcaccagcacctttgtaaaatacgaagcggcttcctgttactttcccagcgcgttcaaaatctaaaattcctaaatcagtagcaagatcccaatgtggttttggctcaaaagtaaattctttcacttctccccaagtacgtgctactacattatcatcctctgtttcaccaactggagcagattcatgagggatatttggaatagataacattaatctttctaagtcttcttcaactgtacgaagttcgttatcaagatcctttactttttctccaacctcacgcatttctaaaattagagcctctgcatctttcttttcgcgctttaatacagaaatttgttgagatacttcgttacgtttactttttaattcttctgtctgaacaagtagttctcttcttctcgtatcaagttcttcaaaacggccgaaatcagttaaatcttcgcctctatgctgtaatttcgcttttacttcttcaaagtttgtacgtaaaaatttaatatcaagcattatatactcctccttttattttataaaacacaaaaaactcccgtccctatataaagggacgggagttaacccgcgttgccaccctagttgaaagcattaccgctttcctctcaagtagaaataacggctcttcaccgggaatgcttactaatccaaaagatattccacattccattccaggatggattcacaaactgtttctatcgatttccaccaaccatcgactctctataagaaacgacatttgttactatttcctatcaacacgcttattttataaaattgttaccatcaatttactataatcttatacaagttgcaagttacttatacaacttttttcattttcgcttcttttaccatttcaacaaagtatgctgtcacacgatgatcatctgttaattccggatggaatgaagcagctaaaaactgatcttgtcttaccgctaccattcggtcaccatgcttagaaagcacttcaacattatcagctacttctacaacatacggcgcacggataaatacaccaatgaagtcttcacccacgccttcaattgaaagcgcagcttcaaaactatccttttggcgtccgaacgcattgcgctcaactgtaatatccatagcaccaatatgtgctttttcatagccaataagtgttttcgcaagaagaatcatccctgcacatgtaccaaacattggtttaccagactttgcaaatgtacgaagtggttccatgaaagcatacttatcaataagacggcgcattgttgtactttcaccgcctggtaaaataagaccatcaatctcttcaagttgctctatacgctttacaacaacagcttctgcaccacttgcttcaactgattttacatgctcacgaactgcaccttgaagacctagtacaccgattttcaccattttaaagttctcctttaattaccatccacgctcttgcatgcgttgttctggtaataacgttgaaatttcgacacccttcattgcattacctaatcctttagaaaggcttgcaattagttcgtaatcttcataatgagtcgttgcttcaacgattgcacgtgcaaatttctctgggttttctgatttgaagataccagatccaacaaataccccatcagcaccaagttgcatcattaatgctgcatctgctggtgttgctacaccacctgccgcaaagtttacaactggtaagcgaccaagacgtttaatttcaagtaatacttcgtaaggagcgccagtattttttgcatatgtcattaactcatcttcacgtagactcgcaacttgacggatttctgcattgacttggcgcatatgacgcactgcctctacaatgtttcctgttcctggttcaccttttgtacgaagcatagatgcaccttctgcaatacgacgtgcagcttctccgatatcacggcaaccacatacaaatggaactgtgtaatcacgtttatttaaatggtatacttcatcagcaggagttaatacttcactctcatcgatatagtctacccctaatgattctaatacacgtgcttctacaaggtgaccgatacggcattttgccataaccggaattgacaccgcacccataacttcttcaacaattgttgggtctgccatacgagaaacgccacctgctgcacgaatatctgctggtacacgctctaatgccataacggcaactgcgcctgcctcttctgcaatttttgcttgttcagcgttaactacgtccataataacgccgcctttttgcatttctgccattccacgttttacacgttctgtccctgttacatttgtcatgtacaaaaacccccctaggtgaattgctttcccccgttaaaggcgaaaattaagaatactcttacattctaccactaactatcagatgcttgtctactactttttcataaagtcggtatgaaaaataggaataaaaaaaagctcctatcatgaggagcttttaaaaccaaccttttactgtatcaacagcactattccacatgccactaaagaatgaaccaattccgcgcatagcacgagtaaaccagtttgcttcttctacttcagatgttgttacaagatccacttgcagtgacttaccagttaaaaatccagggtcgtttgtatcttttggcgtaattaccatttgaccaagcgcagctccctttttaataggtgcttcttgtcccttgcttgattcttttaattccgttttataaacatctttacttccttttggcactggaagtgaaatagcttgtttcgtttgaactgctacatctttatctttcgcattttctactcgtactgtttcttgtccttttactgaagaaccttttttatacatttgttttacttcaaagttagcaaatccataatcatatagcttctttgtttcatcaaaacgtgctgtatgagaacttgttttaataactacagaaataaaacgcattccgtttctttcaaccgtaccagtgaagcaatctcctgcctctggagttgagcctgtttttaggccgtctacgccatcatattctttaactaagccctttaacatccagttccagttcgacattgcaaacttctctttttctggacggaattcttttttagggatttttgctgtatctaacacttttggataatctttaattaaatgttgtgctaaagttgcaacatcctttgcagacattttattttcttcatccgctgttgttccttcaggatgcattccctttaaatctttattcgttaaacctgtagaattgacaaatttataatttttcaaccctagttctttcgatttatcattcatcatttttacgaagtctacttctttacctgcaattgcttctgctaatgcaattgttgcaccatttgcagaaaagattgccattgcctcgtataactcttttactgtataagagccaccattttctaatgcaacatttgataatgaagcatcttgtgaaaccttatatgcatattcagaaaccttaattttctggtcccacttaagttttcctttatccactgcttcgtgaactaaatattcactcatcatctttgtcatactagcaatggataataattcatctgcattcttttgatataaaattttcccagaattcgcttctactaaaattgccgcacctgcttcaatgtttaaagcggctcctgtttcagctgatgcattgctatatggcataaaaatgctacaagctagtgtaagcactgttaccaaagcaatgaatcttttgcaaaacatacctttcacttttgctacccccaatatctatgtactcacataaccgttattctaacataatcaaaaaaaaatagacagagatatcaaatctctgtctatttgtatataagacattataatgagtagtttggagcctcttttgtaatttgtacgtgatgaggatgactttcacgtaagccagcacctgacatacgaatgaattgtgcattttcgcgtaagaattctaaatcctgtgctccgcaatatcccatacctgcacgtaagccaccaactaattggtgaactgtatctgctaaaggtcctttatatggtactcgtccttcaataccttctgggacaagttttttattgccttcttggaagtaacgatctttacttcctttttccatcgcaccgacagaacccataccacgatacactttaaattgacgaccttggtaaatttcagtttctccagggctttctgcaacacctgcaaacatgctacctagcataacaacatgtgctcctgccgctaaagctttcaccatatcaccagagtacttaataccgccatcagcaataactggaatgccgtgtttacgagcttctgttgcacaatcataaaccgcagttaattgtggtacaccaacaccggctacaacgcgtgttgtacaaatagaacctggtccaataccaactttaactacgtttgcaccagcttcaattagtgctttcgttgcttcagcagtagcaacatttccagcgataatatttagtgatggatatttagcacgaacttcttttaccttatcaataacacctttagaatgcccatgtgctgtatcaagtacaattgcatctacactagcttttactaatgcatcgatgcgaagcatagcatccgctgttacaccaactgctgctccaactaataagcgtccttgcttatctttagcagagtttgggaattcaattactttttcaatatcttttattgtaataagcccttgtaatacaccgttattatcaacaagagggagtttttcaattttatacttttgtaggatcttttcagcttcttccagtgtagtaccaactggagctgtaattaattgttcttttgtcattacgtcagaaattttgattgagtagtcttggatgaagcgcatatcacggtttgtaataataccaactaattttcgctcatctaaattatttacaaccggtacacctgagatacgatattttcccataagatgttctgcatcatatacttgatgttctggagttaagaagaaaggatctgaaataacgccgctttcagagcgctttactttatcaacttgctctgcttgttgctcaatagacatattcttatgaataattcctaaaccaccctggcgagccattgcaatagccatgtcagcttctgttactgtatccattcctgcactaattaacgggatatttagctgtaagctttcagataaaactgttttaacacttacttctcttggtaatatatctgacctagctggtacaagtaatacatcatcaaaagtcaaaccttctttaacaaatttagattcccacataattgttccccctatgataccagaaattattattagtagcttatcaattggttaaaatactgtcaaggacgtatatatatgttagaatttttagacaataaaaggagcgtaatatatgcatcaaacatcttgtacttggcagcagttaagtttctttttttcatctcaaaacgtacaacgttatcttgcccgttgttacgaaaaatcctctattcaggatgccgaaaaaaaaagttttgaaaattgttatccctttatttattacttagaacacgggaaaaattattatgaattatataagacagctccattttccattcaaccaatgttgttattttatggaattagtcaactttttaaagcatgcctactaactattgaccctaactatcctgaatccactactgttttagctcatggcgttacaactcgcaaacgaaaaaaacaagggtatcaatttttagaagatgaggtgaaggtacaaaaaaacggattatttactcatgttgcagaacaactgtttcacatgaaacacttagaagcagaaaaatttaacatgttagaattaatgggaaatattccagaattacaaaatttatttcgttatagtcaaaaaggatcaactttatataaaatcgattcaacaattaaaaatgagctctccttttcagtcaacctactagatcgattacatatgactaaagagagattttctcgttacattgaaacatcttgtaagcatttatcaatacagcacgtacctgagaagactaatgaatcgaatttactttttacggcgcccgttcaatcatggaatcctatgtacagtactcctttatactatgaacatcttactaatacttattatttgccacttacgactgatcctagaaatcctaagccaatattacctgaactcctcattcattatttattgctctataatttaagcatgatttctaggtatgaaacagattggtggtatgacttacttggcagttatggttctgaagattatccatttatttatcaatttctaagtatttctgctcaaaaaatcccttactatatttcaaattttttattaatggaaccaaatctatttcatgggaaataaaaaaacacaagtcaaatgacttgtgtttttagttgcttggcgacgtcctactctcacagggacaaggtcccaactaccatcggcgctagagagcttaacttccgtgttcggtatgggaacgggtgtgacctctctgccatcattttttaactctgattttcttagcgtggtttttttccgaaatgctggcggtacccctagaagaaagtacaaactctggaatacacatttttataaaagattttcttagacatgatcctgagaataaagagttactaaaaatcctcaatactggacggagtaaaaaaattagtgtaactattatggaatattcttataaagaatgtattgaagtggttaagaattgtttttcaaaaatattcgtatttggaattatggatataggcgatgcagagtactttagtaaagcatctaataacctcgttacatccgtagaaatgatgtatatgcctgataataaagcgttagttttattatcaaataaacctccaaagattgttgaaaaagcaatggcttataaaatgtaaagagtataagattttttattattaacatacaagtaaaagagagatagcaaatgctatcttttttttatgtgagtcactatataataggtaaatcagctaaataatttaatttataaaaactgaaaattatgtatattttttagaaatatttataataaacttacttaattttgtttttgttactatgtagtaaagggatgagatgaggagggattttatgtatacagcaaccagtaatgagaaggttatggaattgttaaatacttggtatatagaaatgagagctagacgtataggcaatgcccaacgtctaaaagagaaaatagatattaaaattcaaaaattaaaaaatgaaaaagaagaagcgttacaagatcaaaatttattgttgtattattctttattggatttccgatacaactacttaatagacaatttaggtatatcaaaagatagttttgaaaaaattaattcttttgaagctccaggagataactttctagcatattattataacttctttaaaggcattcactcaaacgaattaggaaattatattgaagcaaaagaacactatgaaaaagctgaaacttttttagaatatgttccagacgaattagagaaagcagaattttattataaattagcaacatatcattatgatatccagcaagctcttttatctattaaatatgcaactaaagctaaagatatgtatattcactattcaggatacgaaataaatgttgccttttgtgacaatattttaggtctatcttgtacatatcttaaagagtgggaacttgctgaagaacattatactgctgctatgagtcaatttcaaaagattggtgaagaaaagtttattataatgatccgacacaacttaggctggatgtatgcgactcaaaacctatcagtcttagctattcgttacctatctgaagttgtcgaaaagtcccctaaacattataaagcaatatatgttaaggcaaaggagcactttaaattaaatcaaacagagttagcaagtgtattaatagaaaaaggcctagaaatttgtaatgatttacaccaggaagaatataaaaatcgtaatttaattttaagagaaatgaacaataattcacctgctgaacaattcgaacgggtagcattggaagggattaaatattttgaaagagaagaactatattataatgtccaggaatattatgaagcgctagcaaccaaattttatgaagaagacggacattctaaagcgagtaagtattttcatttgggtttacaggctagaaagaaagcatttgataaggaggcattaaaatgaagaaaacattaattggtttaatgggaatcgttacgattttaacttttacaataggtctatctaatccaggagaggttcaaaagtttattcagactaaggttgctgcatccgaaggcgactatggaggataataatttttcagagagaaaggaaatgactttattgctacttaattagggctcatggcacgggatgtacggcagctgcctacattccgtaagccaccgctccacctttactcaactcgataactacagattgtagaaaaaagattagctggcagctgcagctaatcttttttacaatctgtacgttcctgagtttcgcttaacaaggtggacggagcgtaaaacccgaaaaacaaaacctaaaccccttaaaggaagccaggctagtgcctggcaaaaaaagtacctggtatagcaagcccattcccacctgactttgaacgtgtgggacccccgaacccttcacgctcaaaatctaggtggggagctcatctgtcaagggcaagacaagaagcggaatagcccaactcttactgcttttgagtttcgtatgacctactcgtcatgcttcctcgtatcccaactcaactaacaaaagactagtaatcgtatagcctctcccacttcccttgacagacgagctctgggcttgctgttaagcttcgcaccccgtcgggaaaaataattcccaacgggaaggataataccaggtatttttttaaaagaaaaaacaaataccccattgggctatttgcccaataacaaacaaacgttagcctattggatcgttaataggattaaacaatagtagatacagcttgtttatagataagttgttgttttccattaacgatcataaggatagtaaatttgtctacacctacaattcgtcctgtcatacgcacaccactaattaaaaacagtgtaatttctttttttgctaattttaattgctcatataattcattttgaatatctttcatttcagtattatatcccccattctagtaatatttacaatataaataaaattctatcgtttaattcttactatggccactaagaattaaaacatgaaatattaaactgaatcatttttgtgttattatttatcgtttttatataaaaacgataaataatactgtattttttgaggggtaatatgctataattatatatgtaagggaaagagaaaaattgaaaggattgaataactatgaatgaattatcaattgttaaagaaacaaatcttattattttagaatcaccaaaaagatatgtgaaagcatttgaggaagaagctacaactaaagtggattcaaataatatggatcttacaaaaaaccagtataaatgttttttaaatgctgttacaagtttaacatttttattaggtgaagcactgacacaagaacaaaaggataaaattattaaaacaaggcagggcataattaatatagcaggggaattaggttataaccgccatgagatagttagatcatcattattttatagtgaaaataaagcactttttaaaagtgtattatagtttacctctaacatataccaaaccgatataacggaagacagaaatgaatatattcgttgttgcaatttcatacaatcttagtgttagtcaaaaaggaaggaaagtatatgcggaagtatttactacatttaaagaagcttttgattatgctaaagatgaaatctttgatttacaagataaagggatcgaggttgattatagagaggttataaatgatgagttaaaagaaagagaacataatttatcatttttagtacaagaactaaatggaacagattttatacaagttacgattagacctaaaaagatatagataaatatagagataaaaaataacaaacaaaataacaaatcattaagaaaaaaagaggccatatatatgaaccaaataaacgtagcatttaaacgtagagctgttacagcaacagtagaaattcgccataatgatttttatgtagaattcgaacatttagcgggatatctgtacatttgtaaatttgaaagagaaatagtatatgtgaaaaataaacaaaatggtggagtagttaattcatattcaaagtcaaatgaagtgaaaatatataagggatacattaagtattcagctgataatccatttggagcgattcccactattgaagaaatattgaagaaatgtgacctgggtacaataagaatagcaagaaattatgtagaggcttattatgtgggccataatgaacagttagaacatttatatccaattataaaaaacgatttatctgtatataagggtgtttttgttgatgggttatcagttagagaagtgatagaacaaacagattttgatatgttaaaggattttaagatgtttaaagtagaacgtgtttgggatgcaatagaacctcatttaatgaaaattgaagatatgttctttacagaaatatacacattctttaaagggaatttttttaaagtgaattatagagatatttgtacgaagttcttttcataatagaatccctccttctttaagaagggggataaaaggagaaaataagatgaaaaagtttatatatattacaagtattttaataggcggcttattaggtagctatatatcactaacttatgcaaaggatgcaactttatttgaaaaagcaggaatgtatttccttatttttcctaccattataaatagttgtacaaaattattccataaagcaattactggaaaaggagaaaaaaatgaaacattatttgttcctacggtacattgtgccatttgttggacaacactattgttctatatcaatataaaattgaatttccattttgttttaacattagttctaatagtaaatataatcgtttgggtaattctaacaattacagtatggaagcgtaagcaagaaaagttaattgcaataaaataaaagaaaatcaaaaatctttgactttaagatataccaaatagatataataagaagttgtaatttaaaaaatggaggactttttatgagaaaagtaaaagttatagtaaatacactagaaggagaagctgggagaattgcttttaaagatgttgggtgcgccaatacttttattatggtaatgaacaaagaagctttaaaaaccaatcaattaaatttcaaaattgaagttaaattggttttacaagaagaagattcacaaaaaattcttgaattattttataaagttaatgaaaataatgatgattcgccgattcaggatgaactaataagaagctatatacaaatcaagaatgaaatgcaagaagaaaaggattcacaaaaaattaaggaactagaagaactacttaaaaagtataagtctattataagagagctaatccctaatattttataaataataatttgaatatcattatataaatctaaaaagctcttataatatacaaattttaaaatgtcaacatattagaaacctgttagaatggccaactggagaacaaattatatctttgagatccagttggttgcaacaggaaataaaaatactaaatactatgaaaggtgtaatgaatatgggggattttttaattggtttgtttagtcttatagttatattaatcttattactcttattttacataggaatacgttacacaaagatagtgggaattgtatttggagcttttccacttacattgtttttcttatttttattatataaatttttagaaactacaggtcagcttgttaatgaaatatataataatgcaggtgttaaaggaattataataggagtctttggtttttgttttatactaggcatagttggattgatagttaatgctaatgaaaaacaaatacgtaaagaagaattttgattataaatttatttatatggattaagggttatataaatataaaaaagggtgtgttttgatggataagatacatgaagtagaaatgttggaaaagaagaggaaatcaagccttagacaaacgatccttactatagcattagtacttatattgggaatagttatagaatatttttctttttttgctgatttatttgggcttatgggaatagaagtttttttaaaattccttttacaaattatatttttggggttaggaatgattagtgtttgtaactttcttatacttcttacaataattcatcaacttgataaaaaaagggacgatattaaatcaagtaaaactttattataaataataatttatacgccaggaaagaagcggctcaataggagccgcttctttttatttgaaaggttggcatcgagccaatttaaaaatgaaaaacacggatgcaccgtgtttttatcaaagtagcaagctaaagcttgctaaataaagcagatagtcaaaggaaatttgttgagtaactaagtggattgaaaataagggcccaaacatgggtttagagattaattatatcttttctgtactttttatttaaatggattccgaaatgtgataaagggagagataggagccttaaattgcgtttttaaactaattgttagagtggaacaaaaattaatgggctactcgcccaaacccagccaacggtagcccgttggatagctgtttattatccccccagcccccgttacatcgggggagctaccctcgccggtaggcaggccaaaacgaaaggttttggcaatgccaagagggtattggtgtagtgaaattgtcaactccttatcctccctcccgtcgctttgctatggtcagtccggtaccgttgacaatgctctagtgtacatgtcttatctttgtatagcttgtcaccatgtttattaaacatatccttaaagaattttcaaataagatatatcaagtcaactagtttataagctagtttgttttgaaatggtggaatatgttcgagaacgtgttctaccatttttaatagctgttctttagaagaacgtaagttgttcgctactcaaatgctagtggtttcttttaacttgaaaatagttatatgcttttgtattatttattgtttattcataaaaacgataaataatacatatattttattgaataacatataccaatgtgatataattatatgtgtaaggaagagaatttaaaggttctaaagtcaattgaaatataaaaatcagtatatcattataatgggatggtgaatttaagtgaagtatccaatatgtccgtattgtgcaagtgaacaaaaaataagaaatggagttctactaccaaaatgtgatttttgtggtgcggatcttagagataaaaatacaggttgtcttcgcctagtaagtgataagggagaaaggtttaactttcaaaaaatgaaaactaatattttcgaagagcatgcgatgcaatcagtagaaatattaaaaacatatcatagttttgatttatacattttattaaaagagataagagaaaaaagagaacttttatatatggggtatgagatatttttaaaagcagcaaagcaggacattgaatttgaaaaaaatgctgaaaaagagttacttgtttttaatgactggactaggcgaatgtatgtaattgaaaatattttaatagaaagacaaggttattttccttctaatataactgataaagtccttcaatacatgtgggatcaaatgaaacattctaaacaaaataagatgattgtacataaaaataattgtaatgaacctaatcatataaatactgattgtgtttagaaataaataaaaaacattattttaatatataagaatcaaaaaatgttaaaacgataaataaataataaaggagaaattctaatgacagtgcttcaaaatcaaatgaaacaaaaattaataactgaggaaaatatagatatgctaaaaattttagcgcatccggtaagactacaaatagtcgatgttttaatgcgacataaaaaatgtaatgtaacacaattagtggagttattacatatcccgcaatcaacggtatcacaacatctatcaaaaatgaggggaaaggtgttaggatctgatagaaaaggactggaagtttactattttgttactaatgtaactgcacaaaatatagttcgaactttatgtgaaaaaaaggagcatgggggaaaatgaattgtagatattgcaatacatatatagatattaatttatgtggtacatgttctttttgtaagcacaattttatagaatgtacaataggtcctaaaaaaataaaaagatatgtagatgaaaatgatgctgtacagcctatagaggtattaagaaagtatcatacatacgatctaatagtatgtttaaaaattatgcgaaaaaagaaatcagattcatattcatcgttagttcaagctaatcatgatacggatagtacaaaacatgtaattaaagaaaaaaaggaattatatagattttggaaaaagagaacttggataattgaaaatttacttatagaaatacaaggctattttcctgaaagaattactgataaatatttaaatgaactatatagccaatgttttaagtcaagtcagaaaagaagtagggaattgttgtctagatgtgtatccttgtagtttcagtaattatagaaggtgaatataatgaataaattaacatataaagcaattttaaagaaatataatcctgaaacaaacaaagcaggtcgagaggttcgttcaattacatttttcgccaaagatattaaagaagcatggaataaagcttctgatgaatttgaaaaagaaagagaaagtaatgatactattgaggttaagttgatatagtattgtcttcagtttgttattatgctactatgattgatggtttaagctttttttcttatagtttgttattttatcctggattaaaacatccaggaattttttttaacatttaactggatagatttggcaaaaagaggtggtatcaaatgaaaacacaaatgtcatttaatatttatattgatcaaataaatgattttacggaaattgttcctgagactttacgggcacatacaatctgtaagtttttaaaaaaggagtatattccttctaaaatagttaacgcatttgaaggtgaaggtgaagcttatcaaataagaatggataaacgcagtattaataaattagatgaaatggtcaaaatagcaaatgaaagcggattaaacgctaaaaaagacgtgaatcgatcagctattatgagagatgtgtttgaacaattcatcaataaatatagacatataaaatttccaaagccagaacgaaaaaggacgttgctgcacgttgaagctggcacaataaataatttagctaaatatatagatagttatgaaagaaataaaactatagaagagtttattgtacaggaatacagtggcccacatataacagctaaagaattaaagaaacgattacgtactgaatcagaattaattcctattaccttggatgcaacaacctttttaatcttggatgaaattgcagaggaatttggggaaaatgttaaacgtgcacacattttaagagatgcaataaaccaattatcacaaggatttaatgcatctctaaatatgtaagtgtaggtcaaataaatgttctatataaaataatatccaggtttattacatctgaataagcgataaccaattaaaaattttagaggggggggattaattcccctaatccacttaatctattttaatccaacctttttttaatgcttttaaaacggcattaagtctatcttttacttctaatttttttagtatacttgaaacatgattttttattgttttatcacttagttcaaatgtttccgttaattgttgattagaataccctttacctagtccttctaaaatgtcccactctttattagttagtaaaccatcaggtcttccagtgttatgctcgtaaatttttaagcgatctaaattatcttttgtattatctaacttcgaagaagtaaaatcagtgtggaagaaggcaactcctggatcttcaatagtttctagtacacacattaatttattaatctcaatatttttaagcaaataaacgtctatatcatattcatccattgcactaaatacatcttcttgtaggcttttgtttgataatgcaattatttttaatgagtaattatcctttaaactagatagtaaaaagtttcttccttcaatcgtttcgtagtctataagtaatatatgtgatacattatctagtcctttttctagtaaagtagattctaattcattataagtagatacatcctggatttttcgatctaacttggcttctaatatttgttttagcccagccctgtatattggttgatcactccaaatgataatattactgttataaggaatgtttgtaggttccatatccttatatccctccttttatgcttttaaataacaatagaaaagttattagacccatataaatattaacacgttttgagtggaatttaattttttgaatattgaaaaagaataaaactgaattagtactatattctattcgtacaactataatcctataatagtaataagataaaaaatactgagattttgtggaaaatgcaagaataaagagttttgaaaggatataagtaggtatatgggggtattttgatgaaaaacaactaaatttggagggatagtcgatttatttaataggtaaaaataactatataaaaagatgttatggtagttaaaaagttctattttaggtataatggtgaagtatacgtattgtaatttagatgatattttagtattattagtatcgaagataaatattctaccaatttatttcccgaattggttgtttatatttaaaataaagataataaatacatatataaataaaaaaatataaaaaaagacaaataaaaaaggatgatgtttcccgcatcatccatcatagtagtgagcaaccccgctaaaagtcgagcactacaattcgcatatttacatcatcataatatcatgttttattttgtgtgtaaagtatatttaaaatatgattctataattttttgcgaataaagtgtattctaaatattagatattcgaaggctatcgagtgttgtttactgctgtaaaaaaagcagagaacaacacttttttgttgttccaaaaggagtagaaatttaatggaacaagttaaacatattttagagcctataacagagtacacatcgcttgatgtaatgcgttttatggttcatggtgcattatatgaaaaatcacctaaaaattggacaatggatgatagaaagagagaaatgcaacgtgaaagattaagagaggttggagttgttcatgtaactactggaaaagagcaactttctacgggacaaagtattgtggtaagtagctttgagacattagaacgcttaaacaatcatttgacacactggacaccacaagtctatatgtggggaaaggctaataatgaagggcgtaattttgaaaacattcgtttcattacatgtgttggagtagaaatagataaaaaaattagtcttgaagaaattcattatgcagcagcagtaaataacttgccatccccaagtgttattctttcaacaccacgaggattgcaatggttttatgtattctctacaccatttttgacagaaaaaggccgtaaggcaggtcgttttgtttctgaagaaattaaaagagcctttgtaaatgtcatggatgctagtgaagtagaagaaggaactacaaagcctatatttgaattagaagcggatcttggggcttattcgctagggtattttagaattccacgagaagataatgtcctttactttaatggacaagcattgaactcagaatgggctttagcatgggctaaagaacaatctaggaagcataaaagaccagcggttgctaatacttcttcaagtagaatgtataaaaaggttggcatcatggaagatccagcaattcaaagtattatcaataacgtatttttacgtggctgtaaaggcaagctaggccgtaataatgctgtatttattttatctttagctatgaaatatgaaggtaaaacagaaagtgaaatcattgacaaaatagatgaatggaattctcaaataaaatcaccattaaagcatactgagattttacgtactgttagaagtgccatgaatgataaatataatgcgcctaaaaaggattatgtagaagaactggctgaaatgagaatggaatttgtctttgatatccgtacaccagcaaaggaacgcttagaccgtcagcaaagccattattcagaatgggagcaagatattatagagatggtagagcagcaatgcacgtctgatgcaccttatttatgcggctctctacgtgctttagcgcaaaaaattggtgaagagtcaccagtaggtaaagcaatgaataaatctagcttatccgatgtattaaaggtttctaaaaaattaattgtaaagactaatggaaaaaagggcagaaatgctcgtacatatattacaacaagaagtgtattactgaaatccaataaacataactttaaagcctttttattagggaaattagcattcaatgaagagatcgagagcactacacttgaagtacaatttcgaggccaaacaagcgaacctgaagcaaataaaaatagtagaaataaacgctctgggccagggggataattcaaaaaaataaatggccgaacccgtacatatatacctatcggtataagtttggtttagagtttcctgttagtggagattatggagttctatttatggttcttgttttaatatttgcatacggtatgtgaaattttgttgagagtactctttatttaggagtctttattatgtgtttctttttcgtggattgtgttagctattttaatcacggttgttactttagatctaagagaatgtgaattgttggggattaggtagtttcatatatttgatgggcatgtatggtgtcgtctaagaagaaataagaacgaatgggaatgaaaagttgtttatagcccatcctcaagggttataacatccatattcttctatcttttttatatggtataattttcatagattagcaaactatgaaaagaagggatgaatttggttcaaataaaagttacaccagaacgtctagagcaatcagcaaagatggtcattgattctaggactttactagaacagatacataaagacctgtatcagcaaacagaatacatagcttcacaatggagcggagcaactagtaatagattctatgcaatgtttaacgatgcaaagccattgatgttcaatatccttcaagagctagacaaaattgcaaaagagttatatcattctgccgaaaagtttcgtgaagctgatacattatatggagagaatttggttagtggagatattgaagaaggtgcaatgtgtggaaaaccaaaatctgatttagagaaggcttgggatggtctttatgatggggcaggaaaaggtgtcggtgatgcatgggaaggctttaaggcattgggagacggtgaaacatggtcaaatatgtgggatgcagttgttaattatgatgaaacgctacctgctatgtggaatgctttctctgattcttttatgaatgatgtttggtacggagatgttgaaagcggttttcattggggttcttatcttgtaacatcggttggtttaggacttcttggaggcaagggactggataaagcttcaacacttgctagaggggctaggttctctaaaataacccagattaccccaccacgtttacaacctgcctttgcaggtgtcggtttaactggtgaagctatgctcagtgcgttaccgccatcgggacactgggggaattatttgagtagctatctcatgtttgctaggccacattggcgagaatccgaaaaacatgcatatgagaaatatcctaattacaaagaccaagtatcatttaaagatagagaagaagtaccgtatgcaagtaaaggcagtactagaccagacggttttgaccatgacctaaatagtagtttggaggttaaaaattataaccttactaccgaaagagggaaacgttcgttaattaatgttttactaaaacaatttgaatatagattaaaaaatttaccagaaggtgcagagcagatagcttttattgatgcaagaggtcaaaatgtatcacttcaaactttaaaggaaattaaagaggaactatcacaaagaacatttggtaaattgaaggtaactatcgaaagagattagatagaagggagatgtatttatggcaacaggatttaaagcagactttctatggtatagattaggtacatctgattttgtacactcatttttctcaaccattagttttcatttagaaaaagagggttggggaacaaaatacccacacttgatgaaagagctatataacggaaggttaacacttcaaaatatcccaaaggcaatcgaggaagcaaaggaagctcgtgaaagattgaaattattttcaccatcagaggtagtatgggatatcgaagacttatccaagcaaccaccatggggagataatatttcaacagatattacagacttatctaactatttttacacaagtggcggtaaggacatgtttgaaatgttatttaaagcatgcaacgaagctttagaattagaagtagatttagaaatagagaatttataaagacatgaaatttcatcatgtctttttgttttgttcccatattcaaaaacatcctaaatgggtgtttttgcccatccccccgaaaagggggaataaggacaacaatactttattcttcttgatgttgcctaacttttttcaaaatgtcctttacaaagggtacagattacaaagggtctgcttttttatttgtttcctattacacaaaggcatcctctttcttcataacatttcacatttgtaaatcctgtcttataaaataggtttattaattcttcattcgttttccatttctccatatgatattgaattttaaaagtttcagcgaccaataaaaaggatccgtttggttgtaggacgcgaaatagttcttttatatcttgttccacatcaggccaaaagtagtgtgtttgaaaagcggttatgagatcgaagaagtttgtatgatagggaatagaagaaacgcttgcttgttgaacaaggactttttgtttttgaacatcctttatattcgtctgtatagaattttttacagcttgatcggagtaatcaatcccatatattttcccaagtggagttcgttttgaaagagtgtgtatcgttttaccgccgccacaaccgatatccaatatgattgcatctttctttatatgtactttttgtaatgcccaattggttagtctcgtatgtgcactgttcataatacaaagcatggaagaaccaattgtcccgcgaggcttttttgcttgctggattaatcgttgtaaaatactcaagttaaattctccttttatgtaagaatatatactcatttcgctttttataaattaaatcctttaaaaaaagcacgccgatagacggcgtacttctaacaatgcaaagccccttttaaccaattccgcgcccgatatgccccgactggaacttgaataagagatgtttcattcccagcatcaataccgtacaattgatcacatgaatttgtatcaaaacttagtaacggatgcccgcccatccccatagcagttgcagcaaaaacgagtttatgaacgaggataccagcttccatttggtgaatgcggtatcctctatagcctaatgcacgtgtatagtaatctttctgtccgactacatgtaagcaaagtggtacttgaaaaaggtttacgttatccatcgtcatactagactgaagtgggtagcgaaggtctccatatcgaattggttgtatggaatgtgttttactgttataagcgtaagctccgttttcaatatttttcacgctataaaaacatccgtataaggagacgcgtgtattttcatttgtatacttaccgtcaaggtcgttgtaataggggaaggaaaggctcgcttcttgtagtaaagtagcgagctcagcttcatcccatttcgttaaaataaaatccgcatcaggagaatatcgttttttacaaagttgtaggaaatcatacgataaccgttctacttttggtagctgtacagcgtacggattatgttgatagtgctcttcatgatgtagtgtttggaagtgtgctgttgattcgatcatagaagcttcatttatttttgttatcatcggatattcacctacatgttttgagcgaatgaaatgttcatgtgcgagcggcggaatttgttgcaacaactcatgagaagtaactgttttattttcacggtaatcattgtgaaaccaattagtttctggctctgtacttaaaggaataacggcatacacactttcttcaccttctgacaatccgagtaaatggttcagtgcacggtctagaaattgaaagtatacgccgtttgtataaccgaattgctttgcacattctagcaattgtccaatgaggaccccgctatctaatccttgaagacgatatgaaaaattattgtatttaaagaaatttttccaaaacatagtggatacgaatgcagcaccgaaacaatcatctatattacagcgattaccgagtgtgtctgccaaataagaatcgaaatttccttcgcgaagtaaaataagtcggtgatgtgcggcgtcataatggtaaatgccgtctgggtaatcgtcaatctttaaatagatatacaattcattcggatataaagcaccacccgaaggaatagatcttcgtaatacatttctctcgctatttagctgacataattgtgttacaccaaatgaataccaaaggtagtgaccaatctcatctaaagtaggtgtagtagaagagttcggtaaagataatgggatttctaaggagagcgggatggtaggtaaatttcgatataatttataaggaagcggtgcgtctttccagtccacctcatgattcggcataatttcatcgatagagaaatggagatgatgtaaaaaagtatctagctgcatgaaatccctcctttactatggaaacggatgtggatgtggatttaatctttcattcgttaaaggttcgtctgtatatccaagtgtcatcggtacggtatatacccggtccagtcctgtaactcgagtaagatggtgaccaaacgtcatcggtagcatgcctggaataataacttttacacaatgtaatccattcttttctatgaggggaacggtttgatctacaacgattatttcaagattagattgatgcaaacgatttaaaagttggtggagatcggatgttaaatccatatcaaatgattgtgatacattcatttcttggaacgtttgcaccggtgcatcttcccgtaaaaggaagtgaagacgttcttctgtttctttcaatccatacagcatactatggtcttccattttattaacgaaataaggatcttgtaagcatttttcgtagtattctcttttgtgctcgagctcatcgtctgttataagtaacatgcctgctatttcttgaatggcgctttttaaggctcgaataggatctaaatgagcgcctcctgcacaaacaacgttcattccattttcacgcgtattttttgcaattacccataagctaggaatgccgtgttccatcgtcgcgttaaaagcgtgtaattcatatccggtaatcgtacgtaaccgctgaatcattaattgtaattctgtatcatttgctgaattaagatccaggcggggaagaggtaattcggcataccaagtgagtaagaaggcatcacgctctacaatttctaaaatgccgtgaaaaatcgcttcttctaaactaccgccaattgcacatccatttgatgtttcatacacgaaagcatctcgatgaccgaggctataataagcaattgattcaggaactaaaagcggtctgttttgtgataaagaatatccccatacccagttttgctcataatcaggatcaaacggcttgaatggaaagttatcacgattgtaatgttcatttgtatggacaccgagtgtgaggggatttagtgcatgttcctctaaatcatgaaaactaccatgcacatttgtctttttccctcgaggcgacataccgcaatatcgttctaaaccttctaaaatagcagttgcttcactcactgcaaatgaatgagttcgtcccgcaacaccttcatttccgaacattaatggcatgtttataatgacgtcagcgaatggtaatacagaatgctgcatttttccgttcaacataccgacccgataatctaaatagtctctcgttaaaaatgtgtttagctcatgaatggaacggcagcgatacgtttcggtgcttacttttaaactcggttgtaaagaaacttccgccgcatccgcagtatcatcaggtaaattactacatacaggacagagaggatctggaagaaaagaatgccgcgtacattgtaatgtttgtaagtttagtaaaataagttcattttctaaagaagaatggttatgagttaatatttttcctgtttctgcgcaaataagatggcacatttgcaacattccattttgggtggcacgtacgtcacgtctcgttacattatctgctttaaaggcatatttccgctgtagttcccacatttctttttgatcaaagccagcgataaaacggcgtccatcagaacaatgggaacatccaggcgtaagaggatgaatgtaaggaccgataataccttcgccaaatgaagtaaaaccacgaagccatggaatatgatttgagcgaaaaataagttcggcatcatgatgaatagtagaaggagatccgtcatgtaatacgagagcgagatgaatattttcaggaagttcttctgtaagggtctgctgacgaatgatggaatattgtttgcataattgatcatgtacatagtctgcaagaaggccatctcctataagcaatatattttgaatcataaaccgtcctcctttgcaattaataccccatacacaccgtctaggttttcttttaaaaatggttcgattgctaaatcgaacacgaagggataaaaattatgttcttctaaatgctgtaaggcaagctgtaaagattgcacacttggaatttcttcttccgcttgtatttccactctaaaagaatccgtgtcatataaaataatagaggattcaggcaagatattagctctgtaaggaatttcttcattttgaacgtgaaagagtgatagttgtagtgcgtttcgtaacgctaacgtcatattaatattagatgcaccgtaccatctatcatttataccaacccaaacgactggaaaactgagaatctcttcactcattgcgattttaggtgtttcatggattgtagagagagcatcgtaataaaatttacaatgtttatcttgaatatcaattaaatcaacagttgtaagttcctctagaatatgtgactgccgctcatacagtttattgtttaaatgttgttgtagtgcccggtaaaatccttctgtcatcgtttctccagcaccgataccgatattgttatgttcaggaataaggcggtgaatgatttctgctacatatgtttcaattcctgttaaaccagcttctcggcgtgcttcattatgagtcaatccactacgagtcataagaggcagaaggggagctgggccatctgatagtggagtagctacttgaatatagcattgtgataatggtaattgatatgaatcttgttcatcccatacatggaatataccggcttctttagaagttaatgaatcgaaaaagcggaatacatcagttgaagtatgttggccataccgatgctcaagtttttcagaaatattttctatcgtatcaattgtaaaactttcatcagttgcaagagggtgttttataaaaggatgccacgttccttcaagtgtttcatagtttaataaaaagaattgtgattctttttcacgatatgaatcatccgcgacatgtttaaacaattcaaaaacgattacatttgctaacatggcagatgtaattggtgagaaggaatccgatgaattttcattttgtaaagtcgtttcatgtagccgatgccatgcggattcccagcattcatcacgattttctgttacgacaggtccagctataccgagtgttgataaacaaatagctggtatgaaattctttttcgtttctctacaaatagtgtgaactgtttttaaaccgtcaatgtctccgttttgagaaacatataaaatccaatcaaaaggttcgaatacttcacgcaagggacggtcaattgtagtatcgatttcttgaaggagtacactgttatcaacttcatatgcacgttctattagctcatgtattctgtcatagtttgtttcatcccgatctgtaacgaggtaatgaaatgtaggtaaaccagattctaataaagaagaaactaaggaagtgagcatatccccagaaccaagtacaaggacatttgctccgcggtatgtttcaaactttaaagcacctgaatgagaatcagcttctaaaaattcaatttgtgaagcatatctgtcgagtaatgtactgtttaattcatgaggtgcatcttgatttgcatcgcgaacgaaaccattttcatataaaatctctccaatttcaaatacacggttttgataggggagagggaggccatcggttatttcggctaaagaataattcccgttaaacattggcattaatttttcaatccaatcataaattccatcaccgtccatacgaaatgaactggcgttatttcgaaaatagacacccccgtttgaatcggggaggaagaaagtatccttatttactttaagttttgcatgaattggaaggttattcattttaatcctccttacgtttaggcatacattattaccttatgtcatgaaatttgtcccgtatgaacacaataaaaaaaggctgtagaatgattcattctacagcctttaatagatttttaatctatcaaccttctaataataatgactttggatcttcaagcatatctttaacagcaacaaggaagctaactgcttctttaccatcaacaatacggtgatcgtaagataaagcaatgtacatcattgggcggttttccatacgctcgttatcaattgcaactgggcgtacttggattttatgcattcctaaaataccaacttgtgggctatttaggatcggtgttgacattagagaaccgaacacaccaccgtttgtaattgtaaatgtaccaccttgtagttcttttaatgaaagtttgttgtcacgtgcttttttacctaattcacgaatttcactttcaatttcagcgaaatttaattggttggcatcgcgtacaactggaacaactaatccatctggagctgctactgcaataccgatatcatagaattttttaatgataagctcgtcaccttgaatttcagcatttaataatgggaattgttttaatgctgcaacaactgcttttgtgaagaatgacatgaagccaagacgtacatcatgttttttctcgaaagcatctttgcgttctttacgtaattccatgatcgcactcatatcaacttcgttaaaggttgttaacattgcagatgtttgttgaacttctacaagacgttttgcaattgtttgacggcggcgggacattttcacgcgctcaactggtttttcgaattccgtttttgcaactggagcaggagctggactctttggagcagctggtgcttcttttggtgctgcagcatgagcttgtacatcatgtggtctcacgcgtccaagtgggtctgtgctacgtacgtcgtttaagtcgattcctaattcacgagccatttttctagcagctggtgatgcgataggacggtttgtatttggtaacccttgtagtgttgcagtttgctcagcatttggtgccgcagctttcggtgcttcagtcgtttcttgttttggttgctcagccactggtgcaggtgtacttactgcaactggtgctccattagcatctaaaattgcgatagttgcaccaacttcaactgtatccccaggttcgcctagtaacttcgatacaatacctgaatcttctgcaatgatttctacattgactttatcagtttcaagctcaacaacgctgccacctttctcaactttgtcgcctacgttgataagccattgtgaaatagttccttcagtaatagattctgcaagctcaggtactttaatttcgatcattttaaatgtcctccccttatttgcctaacggtgtgttttttcttcttttgtcttcggtaatctccatttgttagcctggccttgggcagaatatctgcccaaggaacaagctagaaagcttcattgttactttttagttgctgtaaacttcaatttcttgtttatcttgacggaagttatacttcacatctaaagcatgtgcaacaattagttcttgctcagctttgtgagcgaatggatcgccgccagatggactagagcgatcaggacgtccaatgtagcctgttttcactttatctccagcaagttcgaacagaattggagccatgtaatgccatgcgcccatattacgaggttcttcttgaacccaaatgatttcttctaagtttttaaagcgtttaataatagattgaactttctcagcagggaatgggtacaattgctcaatacgaacgacatgaacttcgtctaagttgtactcatgtttaccagactcgatttctgctgctaagtcaatcgccattttacctgtgcttaaaacaagacgttttactttatttggtttcatgccaaggttttcttgttctaaagcaggttggaaacgtccttcgcttaactgactagcagttgaaagcgtaagtgggtgacgtaataaactcttcggcgtcatcaatactaatggtcgaacagcttctgttcctaagatagatgcttgacgacgcaggatatggaagtattgagccgcgctcgttaagtttgcaactgtccagttattctcagcagctaactgtaagaaacgctctggacgtgcactagagtgctctggtccttgaccttcataaccgtgtggtaatagaagaactaagccagatttttgaccccattttgctcttccagctgaaacatattgatcaaataatgcttgcgcagtatttgagaagtcaccatattgcgcttcccacataacaagagtttctggagcgaatacgttataaccatattcgtaaccaacaacagcagcctctgataacggactgttatgaacagagaatgaagcattaatgtttggtaagcgatgtaatggtgaatatgtttcatttgtatcagtatcgtgtaatacgatatgacggtgtgcgaatgtaccacgctgtgaatcttgaccagttaaacgaattggcgtaccttcttgtaaaatagaagcgaatgctaatgattcagcaagtgcccattcaattttgccgttctcttcaagagcatctttacggcgctcaagaattttcttcactttcggatatacgttaaagccttctggccaagatagtagaccttcattaattgcacgaagtgagtcaatctcaacgccagtatcaattgactgaataccttttgcaacaacatctggtactttaacgtgaattgttgcatcactcgtatcagctggtggtacgagtgcatagtcggattttaattgctcttgtataaactgtgtaattgtttcaacctcatctgcatttagaacaccagcagcttgtaattgatctgcataaattgctcttacagttggatggtttttaatttttttgtacacttgtggttgcgtaactgccgggtcatccatttcgttatgaccgtagcggcggtaaccaattaaatcgattaagaagtcttttttgaacaacatgcgatattgaatcgcaaggttagcagctgcaagacaagcttccggatcatcagcattcacgtgaacaatcggaatatcgaaaccttttgcaaggtcacttgaatatttcgtagaacgagaatcatagctatcagtcgtaaaaccaactgcattgtttgcgataacatgaatcgttccgcctgtttgatacgcgttcaatctgcttaagttgagtgtctcagatacaataccttgaccagggaatgcagcatcaccatgaactaaaattacgaatgattttgaagtatcttgatctggaagaccagattttttacgattctcttgagccgcacgtgcgaaaccttctactacaggattcacgaactcaagatgactcgggttatttgctaatgtaacgcgagtactaacttcttcgttactaacgacttgttctctacctaaatggtatttcacgtcgccagtccagccagaattagccactgcgccttctatttttgcatgtttgaactcagcaaacatgtggctatatggtttttctaatacgtgagcaagtacgcttaggcgaccgcggtgagccataccaatcatgacatcctctacgccgttcttagcaccttctagaacaatttcatctaaaacaggtacaagcatatcaacgccctcgatagagaaacgtttttgcccaacgaatgttttatgcaagaattgctcgaaaccttcaacagctgttaaacgttttaaaagagcagttcgttttttatttgatagtggttgacgcaatgaatttgattccaccatttgatgcaaccacgcgcgttcttcactatcttgtatatgagaaaattcataagctaaagattttgtataaacgtcttttaatctatgaattacatcaagtgcagtgtgaataccttctggtgcatcttgccataccgttttcgctggaatcgctttcaagtcagcatcgctcagttcgttcattgctttctcaagaagagattgtccatttgcagcatcttccatcgggttgatgtgagccaacgtgtgcccgaaagaacgaatctgctcaacaagttgaacgactttaagaattttttcaatgttacctgtgttttgaggagaaaaatgtgttgctgtgttgtcccctgttacgacatcatcttgaaacgaaggagctccaaaaatttcaaaaagctcttgtaattccggatcaacagaacctgctccagttacgtaaagatcatactgctcaataacataaccaaggttcggaccgtggaacttggcccaagggtttgtcgttgtattcttcctcgtcatttgtttaaacctcccaatgcatataatccttttccatacaaaggtgcattttgctctttttcaataagtaatgaatcaataatcaatgtaaatgtttttctttactcttatgttattacaataatttacataataccaaacactattacttatctgttttgtaaaaaaacattcacaataacttatcacccaagttaatctttcatgttataaagtaattttacagaaaaatggggtggatatatttggtatgcctatactaatagctataattgttgcatttaaatataggtataatagttagaatgtttcgataaaaacagtttgaattatgtatattgaaataataagcgctttcatagatattatacaacaatataacggaatatagtataaaaaataaaaaattatgaatttatcgtaaactttatttagatagtgttaaatattgaaaggaaagtgaaggatttctacaaaaaaagttgctaaacataaaaaatgctccataaacagttagtttctataaatatgacgaaaaacaccgtaaaacaaataacgcatttcgtgaaataaagaaataaatgaaatattttaaaaggataaaacaaatatggagatattaaattttaaaaaaagaagtgaggagatatagtaacagttatttacagtgttccgtgtttcgcttcaaaatagacgtgctgaaatttaaaaaagtttcttctatataaatagcgtgaataataatcaaaatatatgtaaagggaacttgacgtaaagtttactttacatatatactcggtatatggaaggagggagaaatttccttggaaaataaaatggtcgaataccgaaaaaaatttggactatctcaagaaaagttggctgagaaacttggagtttccagacaaaccattatctcaattgaaaaagggaaatacgatccatcacttccgctagcatttgaaatagcgaaaacatttcagacaacaatagaacatgtatttatttatgaaggaaaagaagagggggaatagggatgaattattcacaaaagtactttgtaattatggggattatttttctatttatgagtggatttatgatattaacaggtataatgacgcattctgcaccgccagccataacgtatccattgctggggatgatgattatgtgtttctgtctaagctacttgcatccgcaatttaaagaaaaagacgagcgaatgaaactgattcgttataaaggaatgtttgtaaccttttttgcattaacggcatattatcttcttttctctatcggcttaaacttaaaaatacttacactatcagctactgaattattgaatatacttatggcacttacaatgagtaccgtctttatctcatttgttgttttagcaaaaagatattaagatggaggagagaaaggaagattaacatatgcaaatgatgtatgcttttggcattgggcttgtattatttttagccgtattcttatttattcgtaaagacgttcaaggtgggacgttaacgaagcgaggattttataaattaatcggctgtttagttgttatgcttatagcaattattgtaatgatcgtattaattaatcagtcactatagaatgtaaaaacggaaccttacttcggtaaggttttttttattattaaacctaaaaattaccaccaaatccatttaccgtaaataatttgtgttatataatccaatgaaatgatagataaggagtgtagtatttgaataaaagaactatcttctatttattaacttgtatactactggtagctagtactacttatataatatgtaacaaaagagaacaagtgccacctatattagtatgggacgaacaagaatactatgttacgaatgaacctgtcaaagtagaagaagttgggcaaaaacttggcgaagtaacaaagaaaattaaaacaagtaaaaaacctactaaaaatagagaatctaatacattacaagagaaaacagaagtattcataatgattgaggaagaaaaaagtgattacccgcctttaatcataaaggaagcttatagtgatgaatatagggtagtgaggccgatgttgaagcaagtattatgatgaaaaggaggttcatatgcagacactaactccgcatccgtagtcgttaagaaaaatatttgtctttttcctcctatcggtgccgcttacattttgatgaatagaggagcaatacaaaagagagattacattttatatttattatttgctactatgaatatatcactctggttatcgcttatgatttttgatcggagtatgtggatggtagcagggcattatgtgtttggagcagttgttgttgtttcgaatatgaataagagataagccagcaacctcaaagttgctggtttttattttgctatttataataaagaaacaaatttttaatagagagtagtgggcgttatgagatggaaagagggaacgtttgaaaaaatagacacgaatgactcacctgttgagcaacttataaacacgtttaaggaacaaaacttaattggtggagcaataataagctgttttaaagtgcataacgaaaatttttttaaagaaataccacattcgaaagatggacatgagcacttctttagaagaatcttcaactctttagacataatcaataacttagaagagttaaaaatacatacatcagacaaatataagttttgttttaaagagcagctcgcagtcatgcttgatggtagcattgctgcgcaaattttgtggggcggagcatatgaagggtttaaggaacgaccagttatcgcaaaacaattagcagtcaatgtatgtcaatatatgttccaagatcgatacgaagatattaaagtgttcgaaagctatcgcccttggacagattggttttacgatgttgcgtgggatgttacttggatggtgttagatagtagggaacagaaaatgtggttcatttgtgctacggatacagattgatagaagccgggccttgtaggaatgctgcaaggccctttatcttttgggaattaatagaaaacgaatcatataaatgatatactaaaaaatgtttgtaatgtcagtttcatactattatataatgctgacttactagaaaagataagaggagaatgagcgtgcaaaagataaagagattattgctattaatgatggtagtaggattaacagcagttgttttagcagggtgtgcaaatccgaaagatactacagaagaatttttaacagcgatacaaaaaggtgatgtagaaaaggctcgtacatttgttgagagtgacaaggaatttaataaactaaatgaaaaaacagatgatgctgaggcaaaagcaatgctaagtgcaattacaaaaacctttaaatttgaaaagctagaagaagtatcgaaaaaggatgacaaagcagaagtgaaagtgaaaattacatctgctgatctatccgttgctgtaacaaaagcagtgggagaagttatgccaatggcgttcgctagtgcctttagtgaagacaaagaacaatctgaaaaagcaatcgaaaaaacaatgacatcaactatcgtcaaaaacttagcagataaagatgcagcaatggcaactcgcgaagttacattgaacttaaagaaagacaaagatggcgactataaaatcgttgctgacgataacttgaaagaagtattgtttgccaatgcgaagtctttggagaagatgtttggtgggaagtaattgaattagataaaaagagacaccatatcacgtagaatggtcatctccctgtcaagtagacagaaataaaaagagtattatgccacggccttttcccgatattctatcggggaaaggcccccgccacggcttcgctcactttagaagctaaattatattggtcataataccaaacctcgacaccgcctttttctgacgttgcttggttgaagtgaatcgctacgtccacacgatctcttgtatggctgttacaattcgctatgatgttgtttaaattctggcgttgtgtgcgtccgtcgttgtctgtagtgattgcatagtgaattccgttctcttcgcataattcagcgattctttgcacgactcgtcttgtttcgacttcctccttgtacccatttgcatgtgctcctgtcacaaagtagttatgcccagcgtgaaaagtttttaattgtcccattctaattttcctccctttaatatgcacattgccatgtgccactgattttggtatttgttgcgttcgggtcaccattcaccctattttccatttgtataatttgtccggcttggtctacgatcattgtcatacttccatatgtggaatcagctttcgaatacatagcctgtataactgtttcgtataacggggcaaactctttcggtacacgtcccacgattttataagcaccaccgttaccatgtagcaggtcaccgaatagtgttacaatgtcccctcgcttggtataaagtaacccgtcaccacgatggtaaaaacctgtcgcggggtctagtgccacttgacggaatccaattgtattctttttcaaatagagttcttcggctttgctttccgttaatagtcttcgcccgccttcatatacgccttgtgtatcacctgttacacttgaccaaacaagggtatatccacgttcggtaaactccgtgtccacctcaaaatactctttacattcaattgcatgatagacgaatacaccaccctttgaatagggagatagaacaagataaagaacatgaaacccttccccgtctttgtatatttcaaaacggtaactatcttcgcgggaatctcctacttttagtagggatggtttgataagtgaagcgggcccgccgtttcgaacaccaaatgaaaaggtgtataacggttgcgttgtacccgtgaatccaaagttactttgcgggaaaagttgtccttgaagaacagacccttccgcgctatcaactgggtttcttgattggattctagcaaccctataataaagaggtctttcgctcgtttgcggtatcctctttgtttttgtttctataactggaaatggtttaacaagccccatctattacacccctaacagccgaaccattccatttccggattggcgcacaaatgttattttatttgcttttctcgtaaactctgataattgttcaccgggtttcaaacgaatggttacattcttaccggataataaatttggatttaatgtattatcatcaaagtttaggaatagatcggtgtcaccttcattcactaagtacgagaatttaatgacgtcacctacattgcatacatagttccctgtcccgatcattgcttcgaaatagaagtgacttgctcgcaccgggtcattcgtaacctgtacaggtggcatactggaaatcgaaaccccaccttgtacattcacacttccgatatgactttcaccttcagcaagtggcggtagtttcgtgacacctacgttaccaatcatatttgtacccgatggtaatgttttaaactcaattggaatggtaggcatttccgtgacaactactttacctatattgttattcccagcaggtaacgcgcttgtaaatccttttaccgtgacggtatcacttaccccaccgccaccgtttgaaatcggggcaacacttccgctatttgctagtacagcagggttaaacggttcgttaaacgatgttaaaatgattcttgcagcatccgcactatcgttataaatttggatttgggaagaaccttctttccttgctaaaatgtttcgtccattacccggtacaagtaattcgtattctcttggacttggtaggacacgaacgcccgcgtatagcgtcgctacagatagattgttaatgtcataatggtttgggtttgtatcaatgaaatgatgtgtatacgccattttaggcggtagtgtgagcgtgacctcacgccatgtattatcctttaacatgtttttcaactccttaaaatacttttacttttatatccgggaatgcttggaagaagaaatatacagctacgatcagaaagacaagaatcataacagcacgaacgattccaacaaatgcacttgtgataaatcctttgtcggaatttggggaagccgtccccgtgcttagggcaccgccaccgtcacccgtgggcctgtcgatcaatgttttatcgcctacgtacatctttccggcttggtgttttccctcttgccacccgacgtgtacatgatcgtagtgtccagcagtttgccataacacttccgtaaatagcggtgacgttttcgcccatttcgcaaattcgtccattttatctttcgaacccgcgaagtccatagccatgccttgggaatggctatccggtctcccgcttggtccggtagaaccggggcggtatccgcttgtgaatcgcaaaccaagggataacgtcttgtcatatacttgcttcaacttgtcgtttagtttgagtccctgtagttccgccattcgtagcaccgcctttcggttttacttttttatatcctctagatcgtgaggatgactttgtaactttctttgctccgctctttgccgtagcttccacttgtgggaatgccttggcaaaaaagagaacacaaaccacaaaagccaataagataagcaaggcgcgaatgactccattagcgacacttgtgaatattccacgtttatcactccctccaccggcaggaacgcttccctctccggtgtatggcgtcccgtcgtcatacttgtctaatccgttttgcttaataatagatatcaattgtcccgcatagttggggtcagtcgcgtatccgcccgccttaatcccgcgcgcaaagtcctcaaatgtcttcgcattttttagttgggacgcatagcgcggtgtttgcagcaaccgagcatggtcagccatcgactcatagtagctgttatatttccggaatccagaaacacgaccaccgcccgcgtcatactcttgtgaccatacagtatgtgttccggcaggtccgacacctttaatgccaaatagattcttagcattataggcaagaccggacattccgccgggattctttccgctagattcaaacaccatttgaccgagaataatagaagcagggattccagtttctttttggattcgttgggcgtcgtttatgaatggtctaacatctagagccattaattaataactcctagaatgtgcgccatagcttggtgcgtccccggtcttcactttcccgacttccattccgccccattgtttgtcttggacaccttttttcacaaggtcagccatttcttgacggtcttttccgtatgcttccacaacatagtaatccttcgcgcccgcccatccatctttaatgaattgttttctgacatatgtcgtacttgctccagaattaattaaatattgttgacgttttaacgcttcatcactgttatcgaatgtgacataaatctttgttagttcagcagggtctttcttcccttgcagttctaaaatggaattaagcaattcttcttgtcgcccgacaagcgtgttcattccatcttgcacaacagcattttgactaccgagcgttggatagtttgtatagtagtccttcaattcttcctctacggcttcttgcgatgaaccaccgctatgctttgccttattcataaaaagagccactaggacgacggcaattccgcctcctagtaatagcatcttttgttttttgtcaaacttcggtttatgttttccgccactcccaccgcttgcaggagggtcgagtctttcaaattctggcattccctacacccccataatgggattcccgaaatagtagccttgcgggaaatcctctcttcggatttgttcgttttgcaagtttggtcgtgttttctcccacggttcttttaccgggtcagccacaaccatttttggctgctttgctgtatgcttcaccagtaacgcataagagccgaggtactcgtcaaactccacgttcaatctgatagagggttcatatacgggcttgtccaacgcttggaacgcgtgacgatttaaattgtcgcgcttgtaatccatataaaaccctcctatcgtccttgtaatgttttaatgcccgcaattgagtttttacccatcgcttcaatgattgacactgtttctcgaccatttgaaaggaacaaataaataccaatgagcattccaattcccgcgatcatgtcgaatacttttgtcatactctcacctcatttaatagttttataaacttgtccgaatttgtaacaaccatactcattaatacgagtagcaaaaatccatttgttacacgctcgttcgtaaaggattgcaataggacggtcacggacataaagaagatgacgaatggcattgactccgtaaattctttcatttaaaccaccctttcaccgtaccccacgtatcctcgaataagtcctcccaactgtatccgagccaccccttatctttatacgcgttcgtttcggcacgtttcttgctctgttcggaaagacgttctaacacttctttctttttggggtctttttcattctttgcaggtttttcaaacagaatttcacccgcttttttatccgcttctttttgcgcttcccttgtattctttgttgtttcttttacagactctttcgcaccgtccaccactttctcagcaacttcccccgggctaggcattgataagtccggcgtcatcatttgcgccaattttgatagacgtttctttccgacaaagtcgtcaaacacgagccataaaaataaaagggatagagtgagaaacgttaaacctttcgcgtcgttgttcacatgtcatcacgcctttttctttcgaattacaaagaaccataaagcaagaatggcaacaactaggattaatgatttactcatgcttaccgccaccattcttttcaattgctatctttaaatcagttaacgcacccgtcatagcttgtgtatcctttgattgttttgtcatcataaaaatagccgtgaaaatcgggaatcccacttgactaatgaattgagcaatctcattcatgacttacaacctccccgccacataaccgaatgcgattatgataatgatgaataaaccaatggacttccaaatgcttgcacctgtcactgggtcggacttcggtttcacatctgtcttgatgtccttttcatccactaatacaacttggtcacccatttccgctacggtgattccacttgtcgtattgaaacccgtatccgggtatagatcgtgatagaaatgattcagtcccattctgttccctccttataaataggtaaggagcataaagccccttacatttgtagtcgtgatattgtttccgatacgacagtgactttcccgcctacttgcgtgctgaagcggaaccagaattctgttaaacgctccgtatccacatagtcgcgtgaccctccgaggtttggtacaccttggaatgagaagtcaaagcaatacatacccggtggaagtggatagcctagattactatgactttcgtgtacgagtatttccggcttgatattataaggcgtgtccgcttggttaaagacaagttccatattacccgtgaagtcttttggctctaatggtttcccgtttaagtcttcgatgtagagtatgagtttacgataaatcgtccctacgtttagttttaaaatgttttgtccaccgccactgaaaatgtccgatttcgattgtacgagtttcagtacagacatatccggttgcccgcccggaatcgacggaatagagaatgtttcgatctctggtgtaatggacatagatttaaatatgacttggtcattatttgatggatttaatttatatgcatttgctaattggtcaacggcaattgataagtttacgttagccgtgttgttttgcagcataaccattccgaccgggtcacgttcatttaaactaacagggattgggattgtaaattgaatttcattgtccttcccggctgttgttgctacgttttccacatagtttaagtattgtttattcgcacctggtaacaatacgtccggatgattacgtaaaacgttatacataaacagttctttccctgatacaatataaggactgaagccgttatttaagttgagttctactcggcgtaaaataccatatggagacattgggtcgcgttgaatgttcccgctagagcttttcaacgtggctacggcttttacatgtagcatgatttttgttaatagacgcgctttcggtaatgtgaaatcaagcgtcataccttcttgtgtaacaacttgcgttggtaatgtttgtttgtattgtcgtgttgacgtcgcccagatcattgcgcgttgttgcggtgaatattgctctttctgttgtgccattagtttgttcctccttcaacaagtccgcttcccgcgccttgttcacgtttgattcgttccagttccgcttgctttgcttcattcgctaaacgttcttttcgttcgccttcacgaatttcaaagtcagcaaaacgttcatttgattccacatattccgcattttcataacgacttttaaaattagctagctgttcaaatgtcggtttcgttcctgtgaaatgtgtattaatacgattcatatttccatcataaatagtaactacatgcatgttataccgcctccgcaatcggtcttacaaccggaatattatacttatcagaaccttttttaattaaataaatgaaaatcattgtcacaaatgtgttgataaacatagatacccaccatgacgggctaaatagttttcccatttttcttttcctcctttttcttactttttcttaaatccattgcaattcatgatgttcgctcctactataatccctagagcaaatgacgacatagccgtcggaacaataacttctaataaatgcatgtcacacctcctatacggcttggacaacttcacttagtcctttcaccggatgttttgttaaaatcgctttcgccatgactgttaataagataaacatgagccataggacaataatatttttcagtccgacccctgcaaatttaccctccacattgtcaccccctttcaaagtttcaaagtggcgcggacaggttcgtcgtcactatcccgcatgtaccagaaattacgataacccggtttgtccataaacatatcagaccccaaatcatcggcaacacgctttctatccgccactttattcaaatcaaaaataaagaagtgtgtagagttggacataatatccgatggaatcgttgcaggtctttgtgtacatgcccatacgacggaatccacaaagcgtcctcgctgatagaggtgtttcatatgatacggatacttacttggacttggacaaacttgcattaactcgtctatccataaaattgtgttatgtcgctcatacacccatttcataagcgcgtcataatactcttcatcttgctcttccggaatcggacaataaattacctttttcgtgcgggcttcggctacttcttccagtgtctcgaccagtacaaagtctttcccttcctttaacccataccataggttctcgcctttcttccgtctctcaagtgactgtcctttcgtatctaacataatcacatggtcgtacccggctaggtaaacctcagcaagaaacgattttccgctacctgttttaccagctataaaaacatgttggtcagtcgggattgcttgcatgtttcttcattcccttcttgctgtaactcctttccgtgcgcaatacaccttttccatttcgtaacgccttaaatcgtgacgaataggggatacgtggtagtaacgtgttaaaataatgctcgtccatacggtgacagatatcgccgtattcaaagaccacatatttctcaccaatcgttacaaaccactcgtccagttttggtaagcacggacaccaatttgtacgccaatcatcaagcggaatagaatagatacacctactcgcccggataagtaccgtattggacatagtcaatcacttctttcagcttttcaagtccattgtcgatttgttcgtcaaagtcctcaaaatggagcgcttgccggaatgagttgattgagttccccgctaaaagcttgactggaagtggaaggttttccaacacttggtccgctacttgctccagtcgttcctgttttgtttgccccggtgtttccggtaggctgaattgatttagcataatttgttaccacctgcgctttcttctgttttcttgtggcattccacattaagaattttggtacaaagattgtaaagcatgcgatagcaagtgcaatcgcgtcactattttccccgactttttcgagtgctgcggtttttgctaacatattctctatcggttcacatagcgtattaatttctgtttcacttaaagcccatatttcaaacccttcacgggtagccaccatttgtgacactgtcattagaattggtttcaattgcaagatttccattgacggtgcttttgatttcccgctagatcgtggggaagattttgtattcgcgcgcgaacgggcttttcgttccctgtcctttttgcgcttctcttctagcttcttttcctctccagacagttccacttctttaccaggaacgtctacaggaaccaacttaggaagccctgtttcttcggcttgtccgtttcctccacttcctccacttccggctcctcgtcttcctctacttttggcttcggtggtaccggtactttttgcgttccctgttgttcctccactttcggtgttactaggtctatcagcttttgtgcccatgctggtgcttcctcctcgctttttgattttggtttacgttttggtttcggcttttcttcttcctcttcttcctcttcctcaacctcttcgatctcttcctcttcttcctcgtttttcttacgcgcgaagaattgtccgtcaccgaatcgtaatagaaaggggttttcttcaattgcttttagcatgtctgtcatttgaatcatctccttctatatcttgtaatttttcatctagtttatcgcctaaataattcatgttgtcgcgtattaattcttcattgaaatctctcataaacgatacatgacttgttaatgattcattttcttgtagcaaatgatagattcgttttgtaagaatagaatttaattttcgtagttcttcattttgttcttcatatcgctttactaacgtcttacaatccatctgtcacactccttatcgaatgtttgttctgtatatgtatactataatacgaacaattgttccgcataacgtcacacgtgtgtcattttggacaaataaaaaagactagcaactttgctagtccttttccgcattttctgttttcttttctagttccttgtagtcttcttttgttacttgcattaacctgtcgatgacatacgacttgcttacgacttgtttgctagattgtgatagttcgatgataaagtcgagcaatttgtcacgcatacctttcccctccttataacaactggatggctctaggtctttgatgcactctcctaattcgtcctttactttccaattgcattaaatagcgatgtgctgtcttatgacttacgtacattcgactcgccatatctcgcacactcggtgcaaacccaaactcttccatatacccgcttatacattctaacgtatcctgttcccttggcgtcaacatttttcgtcactccctattataagaaacttaattcgcctaatagttctttcatgtcccatcctgtctttttacaccaatcttgaatcggaagtccctcatttgaaaaacacatagctttcgcttttgaagaatactctttataaagtccgtataacttcctttgctttttctctggtatttgtatctttccaaacttcatacaaagttcctctaccgcattcatatcatcgttaaactcttctaatctttcataccattcgtcaaactcatactctgacttttcgtccttattttccccatagtcattacgaactagaggtgaggtaatatttttatttagatcaatgtttcttttttgttccctagcaaaattaattgttttatgcatttccgctagttcgttcatttctatattatttttagatttcgtcaagaatttttgaacacgttccccgcctttataaataggaatttcggctttcccacgttttacttgtaaataccatttacgaaatgaattgtagtctagttgttcctctacaacccatttcggaacacctttcattcgtaatacttcctcatattcaccatcggtattaatagctttttccgcatacatttttggttggaaatagagtccttcaataacatacccttctaacttccactttccatactctttatcgtgaaccattttatcaggaaatttcgtagttgttgcacaactgtccgtatcacaataagccaaaattcctttttcatgcgcatacttcaatcctttaaatagtagaattcttgcaatagaagtaatatatgctgaaatatgtggttgaatatattcagccatagcatatccgtcatactctaaaaattccattcgaattccattcatatcatatatgatctcgcttactgtatgtccttctgcttcaagtttatctctctcagaaatatcagcatacatgattcgttcccgctgcattgcaaattttccatacaacgcattctgcataagttttgaaaaggctcgtttagcacctttacttgtattttttatttcctcaaaatacgaaataaattcacgaaagacaggtgctgttttctcaaatacaacaccgctttcgattttttctattttgcaaccttccgcttctgctaaagctagttccggaaatgtccaaacaccttctattttaccaactgggaaaatcaatttacctgtatagtcttttttaggtaagataggaatatacatatcttcgggtacatgtaccttcgcatgtataaagcctgctccatatcttcttcttttccatagatcaaaagaaagttctgcttcttcattatccagtacattcgggtatccgactggcatttcagccattttcataacatatggatataaactatttttatcatagtggtatccgttttctattcttggtgtaaaaacttcggttcttcctccatagtagccttttctaataaatgcctctaaaccttttcctagttgtttatgattatattgttttgtagaaatagcaactttataatccttcttatactgttctttataaactgttttagctagggaagctgtagtcggacaattaataaattgttcaacttctaattttgataggcctattacaatttccaagattttatataaactacgacaatcatattccatgtactcacataggacagggtcatctttatctactgttgtaaagaaattaccttttgtaagtcgcttgttcaatttacggttttttacattataaataccgtaattattttcttccatataatcgacaatatccatcttcccaccttctaaaaggtcgaaatctctacataagttttcaagtgaagacggtagcaatcggaagctatcatgtagtataatatgagaagcggtaaacgttactatattaccattgataaatagcgagttattaaatgttggttcagcataatcacgtaactctgctatgatcttggaaaggtcgaagtctaggttatgtatatatacatgacagtcatatgctttgtacttttcaaacactggtaatacgtctgcaaacgtatagccagtatagtattgttttccatcgaatagtccaattcgaaacacgtcgccgtccaaaccacgtgtttcagtatctagcgtaaagagtttaatctctctacgcttttttctattagtagtactcatcgttatcccaactttctttcgtatatgatttagtatcatatatcttctgaatctcattagcgttcctatgtgcttgtttatatggtaaggaacgaagattatttaataactgctttaaatacttgtcacggtcttttacgtcgtaaacaccaaccattatcgtttctattgctgttaatagttttgtaagttcttttccttgtccctcatatatctttacatagccgtgattcttccaaagtgtattggttttagatacatcacgttttgggacaatccgcatagcaacccttcctaaaaatagtttgttctgggcgttctgcaaccaacctattatagacctagtaatttggctacgtgatcttgtattgtttctctttttaaaatcatatataaacttactgtctgtctcacctgtaaagtcctgatagtatattactagaaaaggtgcttccctatcttgttctttttttattctctctatttccggaagtaactttttccatgaattaaacttactcggtgaaagtccccactgtcttgctagatttgctatttccctagcacgctctctatttttcctattatgcgctttctttttataaacagtttctaactctctacctttcagcttctttgtttctttcttactataaccttctgaaacaagtaacgactttttacgtttcgtttctaatttcttctttaaccgtttatttgccattgtatcacctacttataaagccatgtgacccgtaacaactaggtcacaggtctttggcttacatggctttcttttctgtaatagagttcataaagttggctatcacattatcaaaattagacatagctgcaaccatgtctaactcttcttttgttaacacgacggatgtttcatcttcttctaacttttgcttcaaatgcaccattccattaaaagagacaaattccagttctcgttcatttgtccgaatagatacttgaactaagtttttaatagcgttcacgaccgcaccatccttttatgttttaaaaaagaggatacacaatgtgcaccctcattcatttgttacaaaaattagccttgtagttgaagagttaatgttttaaatcctttacgtgttttcacttctgccggaacaatttctaaaggctcgttccaaggtgctggacctacaatactaataatcttttgaatagatgatacgaccccttgtgacaccgcgtggtatgctttaccgttcttatcaattaaaacaacacgtaatgcatccacatcttcttttgtcaattcatcttgtagagtaatagcatgagcaaccatgtccgtgatttctaatacttcacctctatgatctgctagagcattctcactagagttaatagcattataaactttgatagctgatttacgatctttactttgaatagatgagaagaatacatccttcgctccgtccgcttcaaagattgaaggtgacaccttgtccactgttacgatgtcatttgtatttacatgctcgtccactaccgcgatttcgttaacctcattatttaattgtttagtattgttttccattgaatattcctcctattaattgtccattttatttttattttccaatagtccttttgcatcttcctctttaataaggaatttgtttgctaccttagaagcgtctaactttccagaatgtatcattctatggatagtctttttatgaacacgcaataagtctgcaacctcttgcgcagtcagtagtttactcatattacatatgcaccaccttcttttcacttgtatagagagtatgtatcgtgtctcgatttgtcccgtttgtccctctctgctaccaatattacccgaaagttaccagtaatgcaaatgtttttatgttacagttatgttacaaaaaccgaacatctataaaacgcgtgttcgttttcaactcatttcctattatagcacccttggaatatcttgtcacacttttccttttggaaattccaataaattttccaaattgtcaatagttaattttagaaaattttgtatatcatatttcataaatgttattacgtgtcaataggtaaatattttaataggctagtagaggtacataataagatttcttaaatggtttccacgatttattgaagaaaggcgtagaacttgacgtgaaaatgtacatatttattcaagcgttaatgtacatatttaagttagcatttatacctcttggaaatgcgatgatgaagaaaatcgaaatatacgctgggttaaaggtttacgagaaagcttagatccttatacactaggtgactatgtgaactggcccgatatcgatattaaaaattggcaaactagttattatggctctaactttcacagattacgtaaagtaaaaaccatgtatgatccttgtgatgtttttcatttccaacaaagtattcctccttttcatacatgaaaaaaggggataacataaaaaaatcatccaatataccgttacctcgcagtatgttggatgattcaagttgattttctatatcgtttcaaattcttgctcctactcataaacttttacttacagattaattgtatttcgtatcattttcatgcaatgaatgtaatttaatatttggtactttatctttttcaatacctctattataagaaacaggaacttgaaattcgaattgctttgtctcatgtttttgtaaatagactggtttcggtactggatagctttttgaattctcgtttgcattatcgtataaaacaacttttaatgcttgtgaatgattacgataattttttaaagtaacaatgcacttcggttggatattctctccatttttctccattctacactggctatcttcttttttatattctattgcttctacccctgtttttcctgcgtagtaccatgttttattcaatgtctggaggattgtatttaaaataaacggcatcattacaatcaaaatactaatgcctactacttttatcttattcgtttttctaaatgtactagactccttttttcctagccattttaaaaataatataaatgcaattacatgtagtatgaaagaaacaatcaatatatttgagactttataatccatataaacatacgtatgtatcggaaccttatagacattgaatagtttttccccaattaattcattatcatttggaatttttaataataacaaaacccctatactgtaacaaatagctactaatcgatcatactcaatacgaatcattctttctccccttcactttgtattttattatcgattttagctattattaccatactatacaatctttttatagaggataacgtaaaaaagttccttataaatatataaagaaccttattaatatacactatgaattaaaaaatcaatatacaattttcacatagagatttcttcaaaatatgttggattatgtattgtaatttttttatctaaaattgtaacaatgctatcattttttaattgttttaatacgctgctaactgtctctcgagatgttccagatattttagatatttcaattgttgtaagtggacatgaaattacaatcttttctccactctgttctcctaaatcctgcattaaataatttaacgtttggataacacgatcttgtgcattaggaattgtaatattttgcactcgattttcgttcaattttaatatagatgataattgctgaacaacgtacatcaattgcgttctgctggactttaccatatcttcaaagattaccgttggaatataatatacctccacatccgtcattgcttctgctgtatagttatatcctctgtctgtaaacataccaccataaggaaaaatagaatatcgcttcacatagtcatcgtataataagttcccattttgattaacccgctctaactttacaaaaccatctaacatgaagtaaattctttctcttgaatccccttctaaaaataaaaattgaccttttttataagttcgccaataaacaaactctgttaagcctttcaattttttttctgttaaatgagcaaataattcgaactgctttaagtctttcactacgttccgtctattcataaaattccctctctcttgctgtatgttggagcgaaaaaatcaagaaagcgtattcaatttgaattttatcataattaacttacatattcagatttcatcatgaaaactttatgaacaatgagtacaaaaaatattaataaataaaaagaatgaagttactaactccattcttttttactactaagtagcgtacataagaatttaaacatacatgcatacattctgttttgaaataatagtaccagctttttcttctagtgcttcatatactttttctaaagacgtaataattgtttttctttttggatttgtattaacaaaattaatagcagcttcaattttcggaagcatgcttcccgcagcgaattgttgttcttcaatatattcttctaattgattcactgtgacatgctctaattttttttgattcggttgattataatttacatacacatgatcaactgcagttaaaataacgagcgtatcggcatctactaattctgctaatttctgtgcagcgaaatctttatcgataaccgcttcagttccttttagcccttcttcggaatcaattactggaattccacctccgccaacagctatcactatatttccatcttcgaccaaagaattaatcactttatgttcatgaatacttacaggcttcggtgatggaacaacacgtctccatcctctaccagcatcttctttaaacactgcttttgtttcatccattaatcttctggcctcttcttctgtataaaaaggaccgattggtttagttggatttttaaatgcctcatcttttttatccacaacaacgcgtgttataaccgttgctacgtctttttttatattccgttttttcaatgccttttcaatcgcattttccatccaatatccaatcattccttggctcattgccccacaagtatctaatggcattgcaggtgtcttttccgtttctgcagctttttgctgtaataaaatattccccacttgtgggccatttccatgcgcaattactatatccacatcattttccattattttcacaagttgttctgccgttttttccaacgcttcttgctgcgctcccgcagtagcttctccagactgtatcgcatttccccctagtgcaactacaatttttcttcgtgccatattccagccctccagttgatttcgctttcacagcgctttataaagtaatactgcctgtaattaatccataaatcgcaaagaatgctaaagcaccaattgctacggatgatgctaattccactcgagtaaatatttgcttcgaactcttttgcttttgaacattgtaaaaaataaaaatacctggcgcatataaagtcattgttaataataaatactctaaaccagctgcataaactagccacacgccataaatactggctatcaagccaattattatatttttatttcgatctgcttcttcagactttaagctatgcttcagttgataaaacgctgaaaaagcatatgggattaaaatagctgaagatgctaaagagaatgcaaagttatacgcctgatcagaaacgacgaatgttaacaagaacatttgtattaaaccatttgttatccataatgaatttactggagccttatttttattttcttttgcaaaccattttggaaatactccatctttagccgctaaatatggaatttcagaagcgagcaaagtccaacctaaccaagcacctaatacagagatgaccaaacctaaattaataaaaatagcaccccattttccaacaacactttcaaataaataagccatagccggatttttcaaacctgcaatatctgcttgctgcataagtccaagagacaataatgtgattaaaatataaatgatgagtgtaccaattaagccaataacggttgctttccctacatcacttctattttttgctcgactggataaaacaacagccccttctaccccaataaatacccataaagttacaagcattgtacttttaacttggctgccaactgctccccatgaaaaagaaccagtttgcccccaaaatccatctaagaacgtatcaatatgaaacgcgaagattcctatgacaataaatacaaatacaggtactaattttgcgattgtagttactaaattcacaagtgctgctgattgaactccacgtaaaattaacatgtgaacacaccataataatacgcttgcaccaataatggacgctacattttgcccgccttcaaagattgggaagaaatatcctaatgaagaaaacaataatgtaccgtaagctacattcccaagccaagcagatagccagtatccccacgcactattaaatcccataaaattaccaaatcctgcttttgcatagctaaaaataccaccatctaaatctggccgttttacagttagattttgaaaagataatccaagtgcaatcatcccaattcctgttataacccagccaataataatggctccagcaccagcaccttttgccatatcactcgctaaattaaaggctccaccgccaatcatagacccaactacaagagccgttagtgtaaacaaccctaatttcttatcttcacccattccactcacctctcttaaattgcaataacaatacaaaagcaatagtgaatgatagtgtctaaaggaggagaaagaagaaaggaagactccctttcttctttactccatatttcctaaagtagctgccataaccgctttaattgtatgcattctattttcagcttgatcaaatacttttgaatgtttactgcggaatacttcgtcagttacctccatttctttcaacccatatttctcataaacttcttcgccatacatcgtttcaacatcatgaaatgcaggtaaacaatgtaagaaaatcacgttttcattccctgttgctttaatcattttcatatttacttgataaggtttcaataactcgacacgttcagcaaatttttcttcttcccccatagacacccatacatctgtataaattacatctgcattcgcaacagcttcttccacattacttgttatcattacctgttcattatatttttttgctaaatcaattacttcttgtgcaggccataaagattccggtgtacaaatacatacatccattccaacgattgctccaccaactagtaagctattagcaacattatttcgtccatcgccaacgtaaacgagcttcacatttttcaatttccctagatgttctctaattgttaataaatctgctagtgtttgtgttggatgccacatatctgttaatccattccaaaccggtacaccagaattttgtgctaaagattctacggtttcatgatgaaatccacgaaactcaattccgtcaaacatacgccctaacacttttgctgtatcctctacagattcttttttcccaagttgaatatcacctttccctaaatattcaggatttgcccctaaatctgtacatgctactgtaaatgcacaacgcgtacgagtagaagttttttcaaataaaagcgctacatttttaccttctaaataatgatgcggaataccatttttctttttctcttttaattctgctgccaaatctagaaaatataacaattcttcttgtgtaaaatctttttctgctagaaagcttcttccttttaaatttggtctagtcattaacataattcatccctactttctccgttatttatactaaatatctttacgaacaattggcatactcatgcaacgtggacccccacgaccacgagataattccgaacttagaacctcaatcacttctataccgtgttcccgtaataacgtattagatacatagttgcgatcatatgtaacaactacacctggcgcgattgctaatgtgttcgagccatcattccattgttcacgagcagaagcaattacatctcctcctccacatggaataagaactaattcacttaagcctaatacctcttttaatgcttccattaaagacgtacgatgtgtaattttaagagtttcctcatctgatcctttttctaaaatataaatattcatattcccttttggtccttgaatggctgggtgaattgtaaacttgtcatagtcaaccattgtaaatactgtatctaaatgcataaatgctcgacattttggaatttctattgctaacactttcttaattttattttgtcggctaaagagatttttagctaaacgttcaattgctttagctgaagtacgagcagatactccaatcgcaattgtttcttcatttaaaattagctcgtcgccaccttcaattggaaatttataatcacgatctaaccagattggtacattatgttttgcaaatcttggatgatatttaatgatgtactccatgaataatgattcacgtctacgcgctggttctctcatcttatttatcgttaagccatcgcccacgctagctgctggatcacgagtaaaatataaattaggcattggatctaagtaaaacggatagtgatcttccattaattcatataaatgtgtcttcttacttgtttcaatttcgtttttccgtacaccacccataattttttgaattaattcttcatttgaaaaggaaagtaaatattcttttaaagtttgatgtgcaacatttacgtcggcctgtccttcttttaaaatacgatcaacaaattcttctcgaagttttttatctactaacgcctcagcggctagtttttctaaataaagaacttcaacaccccgattgcgtaacgtttgtgcaaaataatcatgctctttttgaataattggtaagtatggaatatcgtcaaataataattgctgcaaataatctggcgtcaagttttccacttctttacccggtcgttttaataaaaccgtttgtaattccccaatttctgaagtaacatgtatcggatgtttcatttgttgtacctccttttaaatatgtttgatgtcttacaagtacataataaatgctctacactttcatctttgtgaaagtatccacattatcattgtgaaatattaaacaagttatttttttaaaatcatacgaatatgtatttttataacaaactatctcgctttctcaataaaaaatacatatattacgcatatatgttgaatatttaacttccgtatttaaacaaaaatcctgtttttaattttattaaaaacaggatttttgcatctaaataattaaatttaatctttcttctataatctccctatctgatttcgactgtgaaattataaggcatgtatcatttccgcatatacatcctattttttctttccaatctaactcatcaaataaaacaccaataacatgtgcattaccaggtaatgttttaataaccattaattgatctacacaatcaatttttacaaccacttctcgtaattttttctttaactttatatcagtttgtacatgctcttctgagaaaactttatatatcattaatccttcttgagaaggtaccttcgttaagtttaactcacgaatatcgcgagaaaccgtagcttgtgttactaatacatctttttttgctaacaattctactaatctttcttgcttatctatttcatactcctttacaaattgtttaattaaccgttgtcttttttcttttttcataaaagacaccccttttaatattatagctcgctataattttcatccgaaagggacagaaaagaatgttgcggaaacgttcatagtttaactgtaaatattaaatcaagctaaataaaaaagagaagaacagcattctgttcttccttttacattgaaaatcgttcaattgtttgtttcaagtcagttgcttgcttctctaaatcctttaataattgatcgattactatcatatttttagactgttgtagcgtcacacgcgccacttcttgcgaaccagctgacgtttcttcagcaattgctgctacagcttttgtttgtgctcctgtttgatgaatgtggctcacttgttcattcatataactactaatttgctgagttgcatcggctacttccataacacttgatgacatttcttttaaaattaattccgtagcttccccacgtttcgcctcttctttagctattttcacttgttctgtcattttcattgcaacttgttgtacttcatcttgcatattccgtaataactgcgatatgtttcttgcagaatgatcactttcatcagcaagtttccgtacttcttccgcaacaaccgcaaagcctcttccatgctctcctgcgcgagctgcctcaatagaagcatttagtgctaataaattcgtttggctagcaatcgcactcacaacagacacaatatgttctacttgtttcattcgttcttctaacttctgtacattttgcattgaatcttcattttcttttgccaatgtttgaataccttgaattaaagacgtaaagacacgagtactatgccctaaagcttcaaccatttctgaagacaatgtatcagactgcttcgctttttcttctacttcacttgcaatagaagtcgttgtatcaacagcagaaacaattgcttgaattgatgccgctgattgctcagcgcctgaagaaatttctgcaagtgtctcagatacaccttgcgcttgtctcgttgcttcgcctgtttgttttctaatctgctgtacttgattatttgtatacgaaaatgttgtatcaatattttttaccatgccccttaagtttcctaacatcatattaaatgcaacacttaaagatttaatttcatcatctgtcttcggtaatggaacatcttcacgaatatcaccctcagctgcttttcttgccgcctcctctaacttgcgaagcggtttaattaaaaatacggctgctccatatgctaaaattccagaccatactacccctaataacataacgataatattatatacagtttgacttacataactttgaaaataatcgtatatcacgtaaataaaaaagatacttgttgaatatgtaatgaaagctaaaactgtagtgaatagcataagttgtgtacgtaatccaaaagaaaatgttttcctttctttttccatcttccctttccccctttttataagcaatataaatactacctatatattattatccatattttcattatagaaggatatagagattttaaaaaaatattatttctttgaatatcaaattgcacgaaaaaaataaaggattctgacaatttatgactaataacagaaataaggggcaacatttgtaaaatatatttttaactgggggttttgtatgattcaagttcgaaatctagtaaaatcattcggttcacttgatgtgttaaaaggaattgatttagaagtaaaagaaaaagaagttgttgttttaattggtgccagtggttctggtaaaagtacattacttcgctgtcttaactttttagaaatgtacgatgaaggcgaaattcacttacaaggtgagcgaattgatccaaagcattcaaatttaaataaagtccgtgaaaatgtcggtatggtttttcagcactttaacctctttcctcatatgacctcactagaaaacatcatagaagcacctattcacgtaaaaaaattagagaaagcaaatgcaaaggatattggaactcaacttctccaaaaagtcggccttcaagataaagcagatgtaactcctcatcttctttcaggtggtcaaaaacagcgcattgccattgcacgagctcttgcaatgagccctaagattatgctatttgatgagcctacctcagctttagaccctgaacttgttggagaagtattgcaagttatgaaagaacttgctgaagaagggatgacaatggttattgttactcatgaaatgaattttgcaagagatgtagctgatcgcgtcatctttatggatgatggaaagattgtagaagatgctccgccagcacaattcttttcagctccatcacatgaacgggcaaaacaatttttacgcaacgttttataatgtaacttttgtttcgaacgaaaaacaatacattcatacggtgcacaactaatcatctaaataaaatatttcaataacatactaaaaaaccatccgtatgatcaatatataggaggggttttatgaaaagaaaactattaaccattgttgcgagcattacactatgtacatctttcatactaggagcttgtagcaaagaaagctctactacttcaacaaatggtgaaaaagaatttcgctatgcgatgagtggattatacaaaccttttaactataaagaaaatgacagcaaacttgtcggttttgatgtagaaatcggtgaagctcttgctaaaaagatgaacatgaaggctacgccagttacaaacccatgggaaacgctgattcaaggtcttcaagcgaagaaatatgatgtaatactgggtagtatggcaattacagaggagcgcttaaaagctgttagtttctcaaatccgtactatcgctctggcgcccaaatttttgtagctaaaaagaataacgctatctcttctccagaagatttaaaaggtaagaaaattggtgttgtaaaagctagtacctttaaaaatcttgttgcaaaatatacagatcaaatcacagaatatgacagcgatattactgctcttatggatttagagcctgggcgtgttgatgcagtaattacggatcaaatggttggtctacgtatgataaaagaaggaaaatcgaatataaaagaagccggaaaaccattaaatcttgatgaaatgggaattgctattcgcaaagatgataaagaaatggttgagaaagtaaataaagcgttagatgaaatcattaaagatggtacgtatgaaaaaatcagtaaaaaatggttcgggcgtaatattctcggtgaagaggaaaaaacgaagtaagttagccattcaaaagattcataaacagtgccccactgattaaatgttcattttatgtggggcatttcattctctactaaaatctatacaatatgaggtgaaacacatgtttgaaatttttatctctacctatcccacactcttaaaggctactattgtcacattacaattaacattaacctccctagtactcggttcattaattggattattatttgctttctttcgaatctcgaataacaaagttttaaatagcattgctcatatctatattgctattattcgtggtacacctttaatcgttcaaatcgcaattctctattttggcattacatctgtcattgttttctcccctttttgggcaggagcaatcgctttagcaattcataacggtgcatatattacggaaattttccgaggatccattcaatccgtcgaccggggacaattggaagccgctcgctccttaggtatgccttaccctttagctatgcgccggattatattaccacaagcatttcgtctgtctcttcctcctctaggaaaccaatttattatcggattaaaagactcttcactcgtcgcttacgtaggactgtccgaattatggggatcaggtttatcaattgcagcaggtaacttccaacaattagatacttacataatcgttggtgtatactatctcgtacttgttcttctatttacttattttgttaatcttttagaaaaacgactacaacgaaaagaaactaactccgtccaattccataaaaagaacaaaaaggaagtttctttataagaaaaagcaagcctgagatggcttgctttttcattgcaaaaatatattaatttttactgatttacttttttaatactcttttcttcctctatatgttcctcacgatatgaaatattatgaggatctagtccatttcctaaagaaccatagaaatgctctctatgcggatcaactaattcacttccttgataatacacgcgtggtgtattccatagcgctgccaaagcttttgtcatcggcatctcatgatagcgttccggccacatttctttaatcttctcttttactaacgggtagtatttagaactcatagcaggaaacagatgatgttctgtatgatatgagaaattgaagtgtaaaacgtctacccagcgcggcactgttactgacaaacagtttgctaacggatcatttactggaacaattggatttaagcggtgatttgttgcgatatatgccattacaataaagttagcaattaacaacggaatgacatatgcaaataaccattttccaggtcccataataaacaataaactaatccaaactgtccaaggcaaaagaagttgaagccatacagatttttgattggatgacttgaactcttttataaaatgaaagaacattcgagtcgaatgcaatgtaaattgaattgttagtgacagaaaactaaagaatgaacgtacatgtaaaggcatacgatatacccaactcaaaaacttactcttcttaagtttctcaagtgtcggccatgcatccggatcattctcttcatgctgtgtatgaacatgatgcgttgcattatgccactttctccaaagctttggccctgttgataatggcataaatgcaatcgcgcctaagaagtcacgaagccatgcctttcttacaacagttccatgtaaaatttcatgccctaaaaatccaagtgaagcaaaacataatccaagaacaatcgcaattcctagattcgcccacacattcaattcaaatacaccaatcgatattaaccccgccaatgccacaagcaaataagccagtccaccaaataaacgagtaggcactggtttaaatgcttttttcggcaaatgtggtgatacacgtgctgcataccacccaaacgtatgaagctccttcatccttttgctcctttcttatgccgcgccttgcgcaacttacatatatcaattcttgcttccagattgattttactagatgatccaaaaagcatctattataaggaaaatatactcactctatcgtcacttatttttcgcttttattatcaatgaaaaacatttctctttttactctctatcaacctttccacatgatgaatcataacaatagaatttctatattgtcaacaccttttatgacctagtaataaaaggtggttatatttttataatcatactttatttcactaaagaaaatgtatagattccataaggatttacccactatatatagacattttcttaaacgtcatagactctatctcattcaataactccctatgtaatcaacaaacagaatcacttgaatttagttttatataaatcctaccacttcataatgccccatctaattaattatattaaaataatttataacctcttttaataaaaatagactacttctaaaacaacacacatgaatttcatatattatggaaatattaaaaggaaaattgttctaaaatcaggaggtttccgcaatgacaagtgatacatttccacaactgccgctatcttattggattgaatctactcagtttcctactttccctcgtttatccgaaaatataaagacgaaagttgctattatcggtgctggtattacaggtattactactgcctatttacttgcaaaagaaggcatcgatgttgttttaattgattctggtcgtattttaaacggaacgactgggcatacaacagcgaaagtaacagcacaacatgatcttatttatgatgaattaataaaccatttcggtgtagaaaaggccgggctttactatgaatcaaataatcaggctctacaattcataaatgaaactgttcaaacatataaaatcgactgtaatttctcaaatgaagattcatatttatatacaactaccgataacggattaagaaatttatcgaaagaatatgaagcttatcaaaaattaaatataccttgtgactatgttcaatctctatcgattcctattccagtacaatctgcgcttataatgaaaaatcaagcacaattccatccccttctttatttaaaaacacttttagaaaagtttgtggagatgggcggaaagctctacgaacaaacaacagctatggatgtggaaaagggagatcatccacaaataattacaaaagagggccatcatacatgcccatcaacttaagaatttgcactacccccaagtgtcaaaaaacgttattcttcatttcaattaatggaaaaccgtagagtttctatccttaagttgatgggcatgtgatactacccctactactattttttgaggcaagtttatgagttaataaaagatttatggcaatgtaatgcttcaaatattacaaggatgttctctaaaaactatgctttcgggcaatattatggttcaaattgtggcggacttataattcaaatcacaaaataaatcggatgctagaagaccaaaataaagttaatagaccaatactcactgatgatacaaaagaaagaatccaacgctctttacagcaatccttagaatacaatgaagaggtattcctctcttactacagaaagggatatttacatcaccaatacataacagtgacttctatagatccaggaaacaaattgattcattgtcttgatgcttttaatacacatacacaattaaaatttgatgaattaattgatattaaataaaaagaatgcatacacaatcgtacaatttattaagaagactccattctgaaaaaatttaatcaaaatggagtcttttgttagaaatattcatttgtttttttaaaatactgaaaataattaatgcaaaatagttatttaaaagagttaaacccctaacggtacgttaagaggctgtgattaacaaactcttactaaaaatacatgagattgatgaagaaatatgataattgatccctcgcattatagcactaaattaatttaaatttcaacttgataaattttcgtgtgcattcaatttattaaaatacgtattatccgttcaaacgatactaaaaatttaaaatggtataagcatatttatagacctgtcttttattgttcatataaaataaaaaagtacgaaataccctattttgtatgtgatcctgcaaggtaacttgtgggattttttattgtcattaaatcggagggattatatgggatactttaatgttgaattaatgaaagctgaaattactcaagaagaagctatatatagttacaaattatatacaaaggatagctgacaataaggcagataaattatatgctgccgaagtaattgagagagttcataatgaggatagctcaacgaaagatattgattttattatacgttgtcgtaaaatgctataaaacaaaaaggaactctgcaatattaaagagttccttttttatattgtattgaaaaaattttatgtttcttaaaaatgctcttagaatttcaggataaagtgagtaaaatgcatatgtagaaaggaggttttacaatatgcaaaatcaaacaaaaacttttcatttgaaaataaaatttttcggattcaaaataagtattaattattccttttaaaagaatctagcctgtttttatttgagtactaaaaggtaggatatctcttattcctatcttttagtttaacaccattattttcatgaatttttagactgtaacaattttattagatcctaaaatctctaaacttttctctaaaactttctcattatcaatgataataacatgcaatttttttctagctcttgtcatcatttgatagagcatttttgtattatcataatagtaatcttttttacttgttagtaaatttttattgtaaaaaaagttagaatctatcactacaattacattatcaaattcctgtccaataacctcatgtgcgcttttattatctccgttttgatacacttcatatggataatatttatttccgtaaccaggcgtataatttatagccttccatcccctatcagtcagttcttgaatataatccctcacactagtatgaccctcaaaatactgcacgctaatattagaataaatttgatgtgcattactttttgatgtatcaaacaaatttgtgataaaggaaataatctctttattggttctaattgtttttgtcaatggaaaatgtcttggagatacctcagcttttaaaaattcaggaatattattgctaacttcccaactagccagacattgattaggatcatatgaaaaaatacatttcacattgttatcattaatcctttgtaatatttcctctaattggtctttacgtatgcgttgaacttcgtctatgacaatcagatcatattcattaaaggtataactttcatagtatcttatacctgttacttcccaatcataaaacattagctttctatgcccagcatttacagttccacaatgaataataagtactcttttggagttatttatatattcttttgcaatatcatacgctaaaagagttttaccagttccagcagctccttcaattgcaatataggatggtcctccctcctgtcttaaatttataatctcagttttatagttatcttgatgttcagtcaaaaaatactgattctctagaaaggcttctgtagaattgaatggtgagactaaataattacagggatcaaactcttgatgtatgtcttcaatttcaattaatttttgtttatgtatttgtttaaataaaaattcaatatcactctctttaaattcttcattttcgtttaagtaataaagcttttcttctaaggcaacgtaagtgaactgtaaaactttcttttctaaaaaactgagataatatttattacttaaaagttgctttttcattctatccccagtattttttcttttcaattctatattaataatagtttcttctccaaatcttaaaagatcaaactctttattaatttggttaattttatatcctacataaaatccctctactatttttaaaatatttacaaatgatagaagctctttaactaaagaacttaaatcttcgatttcatcttttttaactttaatgtcaaaatgttctttatataattcaaatacggaaggtgatagcttttcacttgcatcaactagagacaataaatttataggtttcacatcaatctttcccctcaacttaaaataaatatctaaacactatcttattctattaataaaataccacatttaaatgaatctggtaaaaataacaaagtacacatataaaaagcaagtaaataaaatcccagtagttaatcaaaaaacagaatattcaatttttatttttccaataacaacatcaccttgaaattccgctaacatgttaagattatggaaatatatactaatagggtgaggggattaaatatgaatgtgcaaactgtctccaaaggagaaataacaaatctactaaacaattggtatcaatccatcatttcacaacatgtactaaaatccacaaatttcaagaaagaaattgatagcaagattcatcaaattgaagaagaccaaaatatacttatctattattcattactagattttagatataagttacttacccatgacgttaaaaactataaagatagtttagaaaagatagattgtatacctgatcaagcagacaccttcctaaaatattatcatagtttttttaaagcaatttattcaattaatataggagattacacatcagctaaagagcaatacgaagaagctgaaacattattaaaggatattccagatgaacttgaaatagctgaatttaattatatgtttggttctttccactatcatatttatcagccactaccagcaatcaaatatactacaaaggcaaaggaattattttcaaagcatgcagggtatgaaatcaaagttgctgcttgtaataacacactaggtcttgcttgtacttccctcggtcagtatgaaagtgcggaagaacacttccttgcagctttaaatactttcaacaaacacgacgaggataaactatcagcaaaagtgaaacataatttagggttattgtacgcagatcaaaacctttccgaactagcaataaaatacctaaatggatcacttgtaaataaccaaaaaacattgttcttattagcgcaggagtatttcaaattaaatgataaaaatgctgtcacgttgcatattaaaaatggattaaaaatttcaaacgaagagtataatcatcatttcaatattctaaaaggattaaatgacaatataagtacagatgaattggaagaaatcattttggcaggaatttgttattttaagaaagaagagttatggaaatacgtaaaagattattcagctattttaggcaataagttttacgattcaaaatcgtatgaaaaagcgagcaagtatctacacatgacaaatgaagctgataaaaaggcttcagagaaaggagctttaaaataatgaaaaaatctctattaatttttgctattatcacaggttttttatctttcagcttcagtaacaatacaaacttacaatctgtatcaaaagaaaaagtagattttgttcaatatgcacatggtgaaactatttaacacaatgaaatactacaaagttatgtcattacccctttacaatgcataacacaaataattattaacaaaataaaaagaacctatcatgtaggttctttttatttgctgtataaagttttataagaaatgctttaacgttaccttttcagaatacagtgattttcatatgtccttaaatttataacaataacttttctacacctacgccatccattaataacagtttcaaagaaggtgatattttaattgcttcttcgatatctaaatctccaaaatccaccatatataatccaaatccttcttttccatttgcatataatagcactttcccaccttcatcatcaccaattgcaagtgagttaggtatatatttttggatattatgagcttcattcatctctatacaatctgctggactccaaatacggatatatatttcattatttacattaatctctgcatctgtacaatgttgaattatctctagataatctgaaggaacatctattgatgaaaaaccttgtaactcttgaattgtttctttagttgctggaggttcttgtgtttctaaagtgaaaactgcatttaagttctcaagtatactcattaatactcaatcctttcatattttacttttaacttatcaagcattctatattgttgttctaaagttcctctaatagtttctttagaaaatcccgctttttcaaaatcagaaactatattctttaattccgcttgtaaagaagagctccattttccatttcctaaggctacacgttcatcacgtctcaagttctgcgcattagtaataatagtatgtggtaacccctttcctgtttcaatcgtcactgttggtgcaagttttggatcatatccatattgacttaaatttgcttccgcccatttcccttgtaaaccgtgatgagattgtaacttccctccatttggacctctcccttttggtttaggcattgattgtatatgcgttttattaaaaagtacataattcgattcagcaccctttacagttttaacagcactagctgacatctttacacctttaccgattttaaccaacttcccgattggtgtaataccggctaccgccatacctccagctatgactctgtcaaaagtaccaagtttctctcccgtagacggatctacaccttcccaagcacgccgaacatcatattctccacttatttcacctgtaatatctctggctaatttattaccatcaaattctttttttcctgatgctaatgaagtttcattgtttattgtttcttcttgatttaaatcgctatacacaattttatcagattcacgtgctttttcctctgtgattttttgaattgatgcagtccagttcatatttaaatcttgtatactgaatgttccactcgcaggactaaaacctttcccactttgaacttctgcaagaccttgagcaatactcgtagctaattgaagcgctgtatcaaaattactactagaaacataattaaattcatataaatgctctagtttttcttgaagcttttgtttcatcgtatcataaattcccaccataacttgcattcctggaagggtaatactagttccttcaatgtctgctttcattcggtcaatttctcgaatttgttctcgtatttcttgttcaatgacatctgttgtagcgacttgtgattgaaaatcgttcggaaaggaattattctgtcgaattaattcttcacacaaataaataattccttgagctaaaggatgaaatgtctgtgcaaagaatgtcttccctgtatcataagttttcccttgcaaaatagtatcgcccacaaaagcatcaattgaattaataacttgttccataccttgaatagtggctacacaaaaagcattcatactttctgtttgagcttgtacttctcccaaatacatgtttaaacccatgtactccccccttaataagtaaatgataccaactaaaggataaaattgtaaactatgattttattgatttttttgataattttaactataaaatccttaatgttatttcgccgccttgtatcctacaattaattccgcaacctatttttaaaacaatcgtagcacaaagtcaattacactctcccaaaaggtacacctttagatatagtatattctttgcagcttaaactacttcaaaaggtatcaaaatgtacttaagacacacttcataagtacacacactttttgagatgtgtttgttgaatgattttatgcttattggaggaggatagtgtccctatcagttggatacaccacagagaatccccttattgtgctgtttattgtttttaatatttaatctggtacatgaaattttacaattaagttattcctttgttttacttataaaattcctatagcattctatatgaattttgtggtattatagagatagaaaatttgtttccattgtttatactctattgtacgtagcgtgaaggacaaaccttacgccctgttaactcgggcgaggtttgtcctttttttttactttaaggaggaatttactatgaaaaaaatctacaaaattggagcaattgttactactttatgtgttgcttgtattgcgatctttactttaactaagaatgaatcagtcaatacagaaactataacaccagaaaaaacaattgtatctgctgcagatgtaaaaggatcacctgagaatataaaagatatttcaaaagaagaattaaagggaaaaatacaatcccatgaagagttcattgcgtattactatcaaccaacctgtcatttttgtaaaaaagctgcaccggatatcaatcgtatgtcaaaaaagcatgatagaaccatttatcgtattgatatctctacaccagaaaatcaaagtgcctttcaagagttcgacattccaggtactccagttgttgtagcttataacagaggtgaagaaattgaacgtctagaaggagcagtgtcagctgctacctatgatggattctttgcaagacgtaattcgagcgctagctagtatagtgctcgttttttctgtttaagaaaggagaattgacatgcaacaaaacgcccgtattcattcgttagacataataagaggtatagccatactatgtatcctatttgcgaatctacccactatgacgggactagatccctttaatcaagcgggttatatcggtacagataaagtgattcgttttttagtagatttgtttatacaggcaaagttctatactattttcgcattcttatttggagtaggattttacatttttatgaaaaatacagaagcaaaaggatatcccatgtataggctatttatccgaagactatgtatcttactactcttcggtttactccaattcacctttctatggtatggagatattctacatgcgtatgccttagctggatttattctattgttcttctataagcgatctactaggcttatttttatagctggttgcagtttcctaatggttagttatgtattacatatcattgtatttttgcgagcaagttcttctatttcagaagtgcccaattactatcaatatatgtttacaggtaacactaccaatcacactgtaaatctatttatacattattctcatcaaataaaagcacgtcttttctttctaatgactcaggaattccagcaactactaataggaattccggaatatataggcttatttttaatagggttatgggctggtaagaaaaatatttttaaaagggtaccggaattaataaagaaaattagatttttacagtggagttcgttatgtatctcatgccttctctcttatcctattatctactactttataaaaacagatgtctattactctcaggatgtacaactatggattctatttggagggaaaatgctagctatattctatatttgtactctactgagagtttgtgagaataaaaaatatatagaatgcctgcacccctttatgaacgttggccagtatgctttaacgaattacatcactcaaagcatacttacgcttgtcattctttcgtggtgctttaaagatgtctcacacgtatattactggcaattatgtatctttgggcttttaattatttttgtacaaattatattcagcaagatttggagtaaatatttccgttatggtcctattgagtgggtatggagaaaaggagtttacaagaaataggggcactatatcattctgatcctattaaacattaaataaaaaagtgcaaaatctatcaacagatttcgcaccaaaaacagataaaaaatacaatcactagaaacataggagagtgtttcaccacttattataaaccatatctttacatttttgtgttgtaattttaaaatatgtaaagattcaatattttgttttaaattttctttttatttaagttatactaaactacaaaggaacaactctcctttaggccgtcaaacattatgctaacaaaacacacaccaaaaaaaccaattcccgtgtaatggaattggtttttttggtgtgcaattcagtcaatacagcaacttgaacccacattttcaaatgtagtcttattaatcttaccataattttaaaattcttaaacaaaaaaactaaatcactagtaagttacgtgaatccgctgctttttcatcaagaaatctggagtataacaacaattaagttcatactagcatgaacaacaaatgatactagtaacctattagtacgcatatatactacagctagtataactccaattaaaaaatacccaaatataaatggaaaatcaaaatgcatgatagaaaagaacaatgcgcttattagtatgctccaagttttcttaaacttagacattaaaatgtttatggccgcataacgaaaaacaaactcttctactaaaggtgcaagaagaacaattgaaacaagtgccacaggagatattgctgctgcagcgactgtactagacgtatttgctgattgcgtagttagctggaatacacccttatctaacacgctaccaaccatctgcgcaagaaatacgaatatgatcccaactaaagtccatatgaatgaatttcttgataatttaatcgaaaactttggatcatttattatttctttactatatataagaaaaatgattatcagcataagtgaaaacccaattagttcccaatgcacaagaagttgttgaattgcttgctgttggtttccctgaatatcataccagcccgtcttcgctagcaattgtacacctataatcccaacaaattgagtcattacaaaataaatgagtatgatataacctgatttatgtatattactattattcatgttaatgtattcgcctttcacttttttatttaattaacgattttgtttttaataacgaactttcattggatccagtgatgtttttcgttcgtcttttttataaaattttcatgttatttttgtaaagccatttcattttcttttttaacacgttttcgattacaccagtagcaaagattgggacccttatgattcattgatggtctatataaagttttaactggcttgctgcattttgggcatttttgtttatcatatttcacgatttcattcccctctcaaataaaaattttgtttagttcttgcagtcagctttttgctaacttcctttttatttacgatcgaagaatgataaaaattcactgtagctaaaaagttcaaattctcccgtgtcacttttaacagctatacctacatcctctggtgttctaaacatcttgaaatcttcatagttaaaccaatattctttatcaatactgaatcctcttaaattggcttttggtacgacgtacatccaatctctaagatttattagtaactcaattgaatcctgtaaaagatctagagtatcatccatatatattccccttttcccttaaataattattttgttttatttcatcgattttaaatatcagataaatcataaattgaagcatctatatgcttaataataaaaatgtcttttttagagtaactactatggttgctaaagctataaacatcaagagaaggaaaacgctctgtaagcatctttataagtaatgaacgattttgatgattgtcgattaaatccaatttttcactccgtcctttttcaaagtcggcaaattcaaatcccatttcacgtaaatattgaatgtgttcctctcggctccttttatctgttacaggagttttactgaaagaacgacaatgttctaacataaagctaagtttcactctcattccaccataggggtaatacttcgtatcatgcacatgattaaaaccttctgtattccaccattcactaacaacttcagaaagatgtttcaactgttcttttaaaccatcaactggtttatcggaacctaatttaccctgtaattcatgtatcttttgattcgcctttttaatctccgcataacgtttttctttttcttccaacagatatgattcgtaatttagtacttttgctgcttcactaaaatagctttctatcaatgatggaagtgtttttgacatttcgattgaaagtaaatctttactcacccattcacgtaattgagcattagcaaagtgcatatcctttaacaccttcagtaatacagatttttgatcctcattcaattccaatttcttttcgtccatttccccagctcctttattttcaaacaacgctttggttaattatgataatgattcttttgctattcgattcacatctttaacaattgcattatctactccatttgttattccttttattagttttaacgattcttggtatttttcgttacgtattttgtactctttatatgcctttgatgtttgctctaaattccacaaagcatttaaacgataattattaatgtcataagccaagctcagtaattcatttaattcagataaactaacctctaccacggtcttaccattctcaaaacgagattttccattagagagtttatttttaattgaatcaatcttttctttcataaacccacctacttctctacaaaattcatattttattacattaagtaattacaaatgaacactaaaaattatatataataattatataattaggtgcccatacagttatctcagactatctactaaaatcaagccgcttgcagatgctttaaacccatttctaatgcacctgttccaccaaatccctgattaaataatagtgggacatcatacttctttgcgtactcttttgctacatcaatagatacatggccacatgcacctttttgaatgacaataacatcgcatttttttataacacttcgaaacgttttctttacgcctccgtgatttttcccatcatggaaaataacctggcagtctctttttttggccaacttctctaacgttcttccatttgatccacctaaaactagaattgtactcattcccactcactctccttatctttcttctttatgtatgtacttggtgatgttaataacacaagtgtacaagcaacaatattcattaacacaaaacaaactattaataaaataatgaaaatcggggacaacaagataaaaataaagccacttaccaccaaacagatgaaaatgaagccattgctcatatcttcgtaaccatctagcccttttacaatatttaaactatgcatccatactgtgatactatcccaattttctattaacagatagccaccacccaacaaaaaagcccatccaagcaacgttcctaataatccagaatttcgtcctatataataccccgaaacaaaattcgcagctgttccaattaacattctcatttgtattcctccatatccatttcatttaacgttatatacaaatttcttttaaccatggttttattatatcagaaaattatgaatattcaataaatgtttttaggtactctttatttttttataaaagggttgtgtttttctccacaaccctcactttcttcttaatccacaggtacttcttcttgtccatgtggaatttgtgcaattggtgttacaatttgtgcatatttgtttacctgcactttaaattgtcgtggttctaagaagtttacctgttgaattaaaacttcaatatgaaacgtatctactttttttccacgatcaattttggtaatacgcgcattgtaaaattgatctccatttaggaaatacctttgaacagcttctgtagccagcatacgctcattacttgtcatcttcattggttcaataccaaatccagcctttgtaaacaaatacgggacatcataactactattagaaatttttcgtagtaaatcctctactgtttttgtctttgcgatatattcttcctcttttgtatcaaatccctttggcttatcaccaagcatctcgatttcatcttgatttacctgctcttcctcttgtacttgtgatttcatcatataacgatgaatcgtattataggtcgcaacgcctactactaacactataattaccaatataactaagtacttacgaggcagattcgctaacatattcatgactttcttcatatcatcacatcccatatcagtcgattacattacggacttgcgtcatatgttgtcctcttgccgtatagtttagacctgtaatttgtacacctttattatcaccaatatgaatcattttctgattccctaaataaatagatacatggttcggattttcatagaaaattaagtctcctggctgtgcacgaccgatatcgggcacctgttttccctgtccaatttgagcacctgtccaatcccctagttggacacctatactggttttaaacacgtattgtgtaaatcctgaacaatcagcactacctgcagctggatttctagcaccggatacatagctcactttcccttgcccaatccattttttcgcttcttccagtaccttttgtcgtttagcatttgtcattgtaggagaaccaccagatgataaccctggatcatcatttttcttaaagaatttcattggatctgttggttggtcattaatacgaatttggaaatctaaatggacagcgtatccattcatattaaggaaacctgtatctctatcaaagttagaaccgcccatttccccaataatttgcccttttgtcaccatagttcccggtgcaactgatattttactcaaatgtaagtaacgagatacaataccatttccatgatctacatagacacctagaccaccaccatttacatttcctgtttgggctgttacaatacctacttccattgaccatacagggtctccagcttttccggcggtcatggccccaatatcaactgcattatgttgctttccaccacgcactgcatcaaacgtatctgtaatacgacctgatttcgttggccatttccaacctttatcagaaatccattctccagatacatctgccacacaacctaaatctttgtaatattttaaaactttggaaacatatgtgtagagtaaacatccagcgccttattacattcctgtgataggtttccagaataacgttttttgacacttgggggtagtgcaaattcttaagttgatgggcatggggcggaccatacaaaatttgatttttaggtaaattcatatgtaccacatccttttgattttctgtgttattaaaatcaaaaccaattttcttctttatatctgtaagtaaactatcactattatcttctttttcatttagtcttgtacttacaccttcttgaagttttccatctagctcctgaaaaatctcttcttctatttcaactttaacaaattctttagcacgccatgttctcaagttttcaatgagtttctttccatttaaaccagctttattacacttttccacaattttatgtactaactgtttactaggcatttcccgataagttagtcgctcactgacaccagcttccttatatgacaaatctaccgacatattatccaacctaaaaacactttctgaattatcatttttaataaaaatagtaccttttttaataaaagctctttggaagtgaatctcatcatgatctaataaacgcttaattatctttcccatttcaatagcttactctaactctattttattttcggtagaaaattccttccccatatatgtatctaattgtttcatctctttgagaaattcaaaaggaagcataaatgatttatccgtagtattacgaccatgtgtatatcgataccccattacaggtcggttatatacctcttttacaattcctttatgcgtaaccattagtgcccctgtaatctttctctttaatatggagtcttttatgtcatttttaacctttgtccctacaacaatataaactgcatcccctatattttctttcatttgttcatattcattccctttttgttgatactttgtcttttttgcaagcgctcggggccaataaaaagtacctgcctttataaatgcttcaaattcttcgactgtgttagaaaaaaaagaaaatactctttccaattaaacctttccctattgcttatatttccaaaatatatcataacatttattcctaatatattaatacaattaacaaaaagtatgcttcctttagacctttttattaacaatttaaaaagaagattattagcaataaaccatttacattcaatcttattatgccattttctttcgcaatgtaggataccacaccatcgctatcaagttaccaaataaaaataccctcaaaacgcacagggccgtgaactaaaaggatctaacataataatttaccttataggtaatcactgttagatcctttcattacccaagatatttaaataataactcctcaggtttctttgtttatatgttttgaaaaaagttgaatgttaggtttttatagggttatttcttttaattactttaaaatcctccaaatggacctataacttctagctaattctccgtatgctctttagttttttcaaagagagaacgaattgcatcagattcaagtgtaaagatctgatgacttttctttggagtggatccctttcttaagattaggttataatcagaattataccttgttctagttttatcgaggtctttaaggtattttacatattgtgcctttttctcctcactaaagttaaacaattccccaatgtattctgtattcctaattaactcttcaaataggttctgatttcttgaatcaatgttaggattcgatagtaaaactgattctttaaaattaatagtatgctcttcggggaaaaaagatattttttcccctggacaacctaataacgcacatatttcttcttgtagctttttacgggatttctctgtgtaaccaataaaaaacaagtgtatattcttaaaggatctcatcttctctttaaaagtaatatgctgacttaattgaataggatagtatttttccttatcaacaagtttttgagcggtttcttcaaccaaatcacttgatagatagtaacgttttaaggcattgacagtttggctacctgagattccgatttcagataatattactaaatcataatctgaggtaggttctgttaaaactctcgattcaaactgatcaagtttcaattgtcttgtatgtggaaatccacttaaaactaatctgtggaacccgttatagtcctcagcggatttgatatgaaaaaatattttattcgtacatctaagagcagcttcaaccttcacaaagaatttttttatatcctcctctttaatatattgatggcttgcaattacatttagaagagcttgatgatattttgggtcaaatcttctaatccaagctattaagtcggcctcaatttcctttaattctctttcctcataaaaagattgttcctttattatgtcaactgctcgactaaagtacggagagtataaaatttctttctcgatttggatgttattgatgaaacagtctaaatttattaaatccttttctttttcatactttttatacaatttctccctaatatttatacaatcaagtgttttgctgataatgtcaggcataataaggagtaaatagccatcattagacttgtaagcaaaacaatactctgtattttctaatacattgacatcacttaatttaaatttctgcatcaaggaattaccttgttgaagttgatatatctttatgctgggccagtcttcttctggaatgacccaggtatcattgtctatatcaatcttaatttcatttaagttatcatcataatcaaaggtgcatttttttaatacatccacaatctgaagattttcttctactgatatatgggtagaaattaaatgctctaagaatcgaatctccttttcccatatctgttctaataaagtgaaatcataacagttaactgagctcatgatactattttttattgtttcaaaaacatgaccgatagagttagttttaatatcaacaggggtaaataaaagctttagtaaatcagagttttccttgtatagagaatgataatattctaggtaaagatagaaggatcttttctcttccccaagtgttttagttataatatcaattaaagatacaattgttttaaacttacacagttcaaaataaaaggcatcatctatttgatccttttccaagatagttaaaaatcttttcaaataaagtatttttaactctgcatcttcctgaatcttcttcggaaagaaatttgtatttatctcagatgtttttattgtataaggtttacccctgaataactcaatgttggtattaattttattaaagaaggttaaatgaaaattttttgtgttattctcaactacctcattttccgataatactaacttattatcataactagagaatggtattaacggaaaatacgtttctttattaattaaatcataatcacctaatatacttggaaacttttctttattttttataaactttttcttaaaaacaccaatactttcaaatactcttattatcttatcgatataagagtgaaagtctttttcgttgctcaataactgatgcagagatatataatcgtgtctgttgtatctgaaagttattgatacatactcaccgtctagccacttttcatcttttatttgaacttcctttaaataatcaaactctaaatccacaacttctttcctagaaattcgaactagtaactgattaccacgctgtagaacaattctatcattttcaataacattccgttgcccgatttttttatttggaaacattgaaacttctttttcattaataatccaattaataaattctaagttgtattttttttgaatattttctaatacattaatactttcttcattcagataatcggagatactttctgaatcttcttttgcttccatcaagaatagaacaattccagtgtggaaatgatcatataacttaagtgtatcaatattactattaccatctacgaagttatcatgaaccttgatagtcagtattgtgtttaagttatttcttgttaatggtttgagctttaaggtggaagttcttcttaaccaattgttgtaatctatattgatggtagggaaataggtatttacataagttattaaattttcccaaactcttttaatattagtgaaattttgctcagtcaatgttaatagacagcataagtgataatacttattgatagtcttcctgctgtctaaaaaatttgattcgaagtctttaggatcattagttcccatggactgattaatcttattaaaaaacatttcagaaactttaattataaattctgaagataaactattgtaaaaaattaaatcataagtattcaatatgaattctttgatgtcacgttctttctcaagagtattcagaatccgctcttctaggaattctggtatgactttttcgaatttgaaccttaaaacttttaatagagtttgatcgtgaacttttaatataaattcattttggacaaattcattttctaacaacattaaagacagtattaattctgtctcataattatttacctctgactttacaaactcatatattacattctttgtcttttctttgtcagtgtaattcttatagtatataacctcaagtaacgtgtttaggaaaactcctttgccaagtccttttagagctttggtgctttcaactaagttattgaaattattatttgttgaaaaataataacggaaatagtttctaaatagtgacccccggcctatctctaaattaaatagatagtgctcaagatttcttttttcctccaatagacgcttattattattaaaatgagtgaaataaaaactcaaattttcttcattgacttcaacaatggttggtttaaccattttgctgagtaggcgtgtagcttttttattaatgaaagatgaattggtttcttggctttttgaagagttatctataaagtacttgttatcattaaaataactttcaaagtcacttttagagttcttcacctgggaaataaggtgcttatcccaatttaaatgtaaatctaatgattctaaataagtttgtatcttgtctaaagtttctttagctttttcttcattttctagaattagaaccatgtcatcaacatatctaaagtaaaagttaaagttctcttcaagcagactttgtatgtatttatctaactcaattaaatagacttctgctaaatatctagcaaatgcggggccctgtggcacgcctttggcttccaaattatctttttcacaaagttttattaagtaatctatcaaatgattatatttactgagctgctcacttgagagtgtatttattttttctttaattatttctgagggtccatgaattaactttgtttttaatcttcctaaattaagacttgaatagaaatttttaatgtcaagttttattacgtaatgttccgcgagtatgtcatcgttaagcctttccataatattattccgatagattaaccattgttgcatccatggtttaaagatattgtagttagcaaaactattttcaaatttataaccgtaagatccatccgaaaattctgtataatagaaggcattaagtatttttataaggtatgtacttattattttttcttcagcttgaagtgcataaagacttcgaaccttactatttttttctaaacgggagaatttataaggttctcgtactgtatagttaccaacaagaacattttctatagcttctttcatatccttgacatcgatattttcaagttctaactgagtaaataagaatgcaatttcatcgttttggttagtatacttcctttgcgctttaataattttgtctatttctgatttctttacttcaaaagcatcgtaaggtaataaatcaacatcaagaaacttaagtggagatgttgtctttaattcgagaatatctttattttgaagactacaaccattttcacacttgcaattatgttgagagaacttatttcttaagaaaccacatgttggaggatgcaggttaagattctccaacttttttctggtaagttcaggtttgaaattatccattctagagaaaaagtcccaaagaatttctttcccatagttatcattttgaggggtcttcaatttattcagtagaccaacaaatattattctttcactctcacttaaattgtttggatatttctttaatatgtcatctataattgtacattgctttattttttttagaacatcctctagattttcatatgtctcttttaaggcattctttgttggtatgaatgggttagtttgtatagtaatctcttctgcttctaattttaaatttaactttaaggctacatctttaaaactttgcttttgataacgtgatagcaaagtaagttgagaagaaagaaactcttcatcaaatttatttttccatatttcagttgaatatacgaacgaataaatgttatctataaaataagaatagctctgagacttggtatgaagagataaaggcagtttcaccccaaatcctaccttattattgttattttgaccattcttaggaaaaagatcgacattgatataaggactcggattattattaatctcctcaactaacctctgtacaaactggaaagcatgtgatttttcaacaggttcagtgaatattacccaaacatgtatacctctattacctgaaaattctgtaagataatcaattttatatgaatcaagaaacttgcaaatttctcttacttcattgataagtatatcaatgtatttttgttgatctttaggaaagtccttttctagtatctttttatctatatcgaaatccaaacaaatccattttaacctagttttaacttgctgatatgtgagatagcttttctgattaattaacatatcatttattcgcaaaggatcaaaaatattattctttgtactatatttcccgttacttagttgttctgcaaaatacttcttattaatgacaaagttttcatatagttctgttgcaagactcttatataaatctctaatgtctactttaacgttcctagctagcaccgactattaacctcccacgatttcttttacttacttctctttaaaattttaacagaatgaagaattgtttgtaatagttataatggaaattctttcttcctaattttcaaaagtattaaaagacagtatttcattccataaaacataactgtacgagagctttattaatatgaagtgtctgttttaaaaagtgaggttggttttcaggagtattttagttaaagtataaaatatggactttattctgattctactaactttattgcaaagatacattattttagatttcttatcttttctaaaaattcccttagtcttctgttttcacctttcaattcgctcatttcgactaactgaataattaaattttgtttatcttctttgagcttttttatctcttcatataaccgctttattttatcttttgatgcatcagcaggtacaccttttccagtttctttgtatgcctgggaaatgattgaatacaaagcgagatcaatcaatcgttttgttaattagaattgcttgtgcttaatttggatagatacgaaacttatagactttattaattatcatttgattcacctccatttcggtatatgaccactatctaccgaacgtatattcgatatatagcgaagtaacactttaagtatgtcgaacaattaagatggctccttgccatcccttgttcaaagccaattcatctcccacctactcacttcgcgttccttgaggaaggagtcttcttggctaaaatgataaacttatacctacaatatctccttaatatatatttctttttccttttatataaactccaataacctctaaaaatatataattttagacataaatttacttataacgatcttatttatttaaattttctgtatttttatataaaacatatccaaattctgttattattaatacatatactgtaataggatgaggagaatacaatggatactttagtcacagaatatgaagtagtcgctaatatgttaaatgattggtatattgaaatccgtgcgagacgaattgataatgctcatcagctaaaagaagaaattgataatagaatgaaaggtgtctcggatcagagcttacacttatattattcactattagattttcgttataaatatatagtagataatttaaatatttcaaagggttgcttcgacaaagtagaaacttttcaaattccaaatgataatatattaacctactactatcacttctttaaagcaattcatgcaagtaccgtaggcagctattcaatagcaagagatcattatgataaggcagaagaacttctaaatgaggtatctgatgaaattgagcaggctgagttttactataaaattggtgccttccattacgatgtttacgaatcactccaatcaattaagtatgttaacaaagctaaagaaatattctcaaaacatgaaggccacgaacgaaatattggattctgtgaaaatcttttaggcatggcatgtaccaatttaagagaatgggcattagcggaagaacatcttgtaaaagcaatggatctgttccaaaaaattggagaagaaaaattcactataatggttcgtcataatttaggtttattatatgcagggcaaaatatgtctgaattagctattcgctacctctctgaagtatccgagaagaaacctaaccactataaagccattttcatcgagggcagggaacactctaaactaggaaaccaagaaactgctaatactttatttgaaagaggattacaactctgtacagaactaaacaatgaagaatatcagcatcggtttaaaattttgagagacattaataataatatcccagctgaaaaattagaagctacagttcttgcaggaatcgaatactttgaacgagaagatttatatgagtatatctatgaatgctgtaatgttctagcagaaaggatttttgaacaagggcagcatgccaaagcaggtacatacttctataaagcaattcaagctaagaaaaaagccgacgcgaaaggagctttaaaatgaaaaaactaattaaagtgatgagtattgctactgctttactatttacattgggaattacatctcaaacagatagtcacgtagtaaaagtcgttcaaagtatgatggcagacggagaccacggtggttgatattccttgacccagaatatattcctgggtctttttttattgaaacaagatataaatcgtcagttttaactatatagttgagaaggaatgcttataaaaagaaggaagtattatctacataagagacggagtttataaccaaaagattcatgtcactcattctggtgcctcaggagcacccattacttttcaaaacttccagaataaaaaggtcattttcgttgattctaaagtcaaaatagataataatagatttatttacaatagaagataaaaattatattcaagtaaatcgattagagttttacaatctaaaatcaactaaagttaacgaaccccctattgatattagaaataattatatcaataccattgaaacaactttaaagaatggaaacacatatgatatcgctgtctatggtacttcatctagtgtaaaaataattcaagtgatagtttcattgatatttgtaaataacgaatttatagcatctgtaactcaagacaaaaatgttaaagggatctttaacatttttaattaaatgaacaaagttttatcattaggagttgcaattaaagatttacccggaccaattgtgggtttattacatatataattacaaccttttaatcttatagaagctttatctcacgaaaaaatataaatataaaataaaaagccctctattgtaaggggcttttacacttcaaataggttttccttcaaataaagaataacagttaatacgttttgtttccattatttttaattagaccaatatcaaccaataactgatgatttgtacgatctacgaacaaaatattttctcatagaatacttatcccagttactagttatctattaagaaatatagaatacatcaattaattttaaccttgtccaacaattactgtaattgtatgatctaatacaccatttctataaacatatacttttgctgttgtggaaaaataagttgttaatttcccagtagaagaaacctttattaaatcattactagtacgataagtcattcctggctcatgataagtaagttgatatccattaaaaaatgttggtaaagtaactgtgtaatccctaatgttgagagtttgtgttaattttttctggtcttccctattaaaatcagtggaagcctgtgaacctgtggttccgatacctaaaatacttagaaaagcaaccgacgttacaagagcataacgaagtttcataatattaactcctccctttataaatgatttaaataacaatagggatttattaccctactagcaagataacatgaaatatatgtaaataaaaccatttgaatgggaattttctgtgaacatatattttatcaacaattgtacataaaaattaattattgactatcctataaaaaaaattaccaacaatttcttaagatatattaattttatttaataacgcgctccttcatcagaataaaaaagtttatcttcttttattaattatttgaaaatctcattaggtatattatattgatccagaaaatcactttcttgtacttaaccttccctattcaccttgttgaatagggagattaatctcttttaaaaatctcgatcttttagaaggtttcccattaattgttgctgggaatgtaatatatagattcttctttggacgagttacagcaaatggtgataggtaaccctttgaattaatctccaagttttcccccaccccgcaccgtacgtgcgactttcatcgcatacggcgctccatcttcttatatattctttacaactgttatataaaaagacttgagaccttccctccgccacttattatcatggtttcattggtactacatctctactgccatctctactcacaatcctttttaccagattattactagacgttagagacttcaaacgttccgatattgctaggtaaataactatacttaggttctacctttaccccgaattcacgttatttaaactaaagcaacccattagctttatccatcaaaatctgtacgataatttctttggagtgaatttttttattttatacatttctatataaagcttttcgaggtgtacattcagtagttcgtcatcaattatgttgaatactaaccatatatagctccctgcccgcattactttcgcagtgttgtttaacctttcctcagcattatctgttagggctactcaatgcgtcttcacccagcttcatacaaaaccgttaccagttatgcatgtgggagtatcagcagccatcttatcataggatttttttaaaggcatcctactgtggtctcacaatatcagttatcattataaaaatttataatgtggtttatccctcgttaagcgatttcaaaccaacgtttcgcaccatacattaagcgcctttcttcttctatagtagtcggtggttcagctttctctatggattcctggattatttctggagtaacttttgtggcttttttacttggtaatccttcatcatataagcctattaaaaatacatttttaaatgataatcctttactcttatgtatagttaataaataaattgcattaaatgtacctttatggtattcatctaactttttcttcatctcttcttttttttggtttaactcttgataccttttgaccataccttcccatgattgaaactgttctgtttctttttctatccattttatttcatcttttgttaactggtttctaacgagtggaaattctaaaaaatttttaataatattttccatagatactgacttcttattctttaatcgtactaactcctcaaagtaatcaataatctctttttttctatccaaagatttatttccacaaataaaatcagcaattttttgtggatttaaatatgatgaactatctccaataaagttaacaacttcttgttttttcttgtagaatgcatatgaagtttctgcaattatttggttccatcgagttaatttatcactatcttcattagatattaaaaaagctttccaatatctatatgcccttttaaatgcatccaagctaaaaatacccattaagtcgtcattagtttctattacaaaagggatattattaacctccagtttatggagtaatgttttaatttgggaagtggaacgatataaaattacactttctctataatctgggacagctttatttcctgataaaccaatatactgagattgatctataatccattcagcttcttcctctggagtaggtaaacttcgaatatagcaatcaccctcatttttatgaaaaggtttcattgatttttttatcctattgttctcattaaatgcaattacccgattcccagcttgaactatttttgaagtagaacgataatttgtcataagtttaagagtttgggtttcatacatttggttgaaatcttttatgtattttggctctgcgcctctaaaataatagatactctgatcatcatcaccaacaatgattaatttagctccgtccttcaaatctggtgggcaaataagtttaatgatatccatttgaagaggattagtatcttgaaactcatcaataaatatatactgaaatcttttttgtacatattcacgcgcttgaatatcatcttttaaaacatgaagcaaatttaacatgtaatcgtcaaaaactacaattttattactttttcgtttatcataaaattcccgcatcatcttttgaaatctttgacttaaagtttcatcacttgttggttcaagcacattaaaatgcttctctatatattttgtcatcatctctatggagaatcccatattcgtccaataacttattttttcaaataaatttttctctccagcattttcatctaattttttcaaattataatctctaattaatttatttaattctttcttatagctgctctcatccggattatctccaataatgcccatttgctctacatatggaaattgcttttttaattcattatacaggcgtataaaaaagctatgaaaggtcccaactgctactttagatttttcctcgtctaagaaaaaattcactctttctttcatctcttcagatgcttttttcgtgaacgtaatcatggctattttttcctcagggacattcttcatcagtattagatatgcagttttcgcacaaattgtctgtgtttttccacttccagcacccgcaataattctaagattcttttccatatcatatctaatagcctcaatttgctcattattaaaatcattattatcatttttaggctttaaaaaatcaaaaaaacctttatcttcatcatactcagaaagaacatgttgctctttcccttcatcatactcaagttctccataaataccttgataaagattcataactttttcagcatgcactgattcttttattttggtattaatagaatttttagcatgttcaagctctactatacttctatctaatgttttatctaatattttcttctcttcttttaacttttcattacttgcatataaattttttaatgaattatttttttccttaagttccctttctaaaacttttattttttcttggaatagttctattttataaatgctaacttaaatatgtacattaacgcttgaataaatatgtacattttctgttacctcgaggcccagtagcgccggtagcgcccgtgttacctcgaggcccagtagcgccggtagcgcccgtgttacctcgaggcccagtagcgccggtagcgcccgtgttacctcgaggcccagtagcgccggtagcgcccgtgttacctcgaggcccagtagcgccggtagcgcccgtgttacctcgaggcccagtagcgccggtagcgcccgtgttacctcgaggcccagtggcaccagtagcgcctgctggtccagtaggtccggtaggtccttgaatgaacgaagcagaattaactagagcagtttgtaatgctgctattaatttaaggagctcttgaagtgtgcaagggtcaattcggaataattttgtaatgtatagtaaatagttaatgagattttgaagctcaataaatacagcgcttgctacaaaggttggatttcttaatatagttattaagtttttaataatagctaacccttgtgctttcagggaggaagtagcgtctagtgaacaaataaatttactcagtaggttcaatgtatcgattaggtcttcaatattttggggagatggatttgcgaaaagttttgggattatttttgttaaatcaataataatcgcacgaaatgttctaagttgagctttagtaattgggattgatggagtattcgggattcgtccggcgctacttggaaagcatggtttggagaatttgttttgattgtcgttataacgagacattaaatctctcctttctcacgaaaatgtgaacgaaactcatcatagtagatgcagaaattagttaaatggtcatagtaaaatcgtttgtttaaagaaaaaatagaaaaaacgccttacaataaggcgttttttctattttctgcgtattgataatatcgctttaaggaaatttttgatttgaatccagcgagttttataatttctgattcaggagtttctttttttattaagtttaaaatataggtgttacgaaaatgttgtcctgaaattcctttacgtaaattggctctagccacttcgaggcgaatcattttttgtatagcaatttccgttaatgcctttggtgcatcattttcatatacccacctgtatgttccacggttaaaatcgaatgcgacaaataatggatcatcactatggtatttaggacgaactggttctgggatgcttttgtaataattatatagttgttttttgtcttcttttgctaatgtaattgttctttctacacctgcggttgctgggattgataatgtattagtttcaaagtgaacgtgatgcattgttaatgctgtaagttcctgtaaggataaaccgtagtcaatcaatagatttaaaatagcaatattgcgatccattaataaggggcgcacaggaagttgtttttctgaaagtccttctaatgaagtgactatatactttaaccttttttcttcatcaggtgaaatgaaatcttcgttacgaagtgtacggtctggttgaatagatatttccatattcttcaatggattaggaatgtttagaaaatgatgcattctatttagtacaataaatacacgatgcatcgttttttctgagtaatgtcgattcgtttttaaatcggaaaagtaatcttcgtagtcttttgtacaaagtgtagcccatatattactggaagggagctttttgtttttttctaaccaatgtccgaagtcttcaatgtcataaacataacgtttaatagttgagggttttcggcctttattcaataaaaaaatagaaaaggcttgtattgtatcatggaattccgttgtctccatagtcccaccaccttaattatttcttatattatagcaaacttttctgaaaataggcatttacaagggggacaggaataataatatttggtgagtggataaaatgaggtgattgtatggaacaatcgatgcgaaagaaaaacaacaatcaaattaatattgtgttaaaccatcgaaagaaaatttctttgccagccgcagaaaataaaacggtaatttcaaatgaaactgcaattaaacatgaaatgctgcagagaattgaagaagagatggggaagcttgttgggatggaggatataaaaaagataataaaagaaatatatgcttggatttatgtgaataaaaaaagacaagaaaagggattgaagtcagagaagcaagtacttcatatgctgtttaaagggaatccaggtacagggaagacaactgttgctagaatgataggaaaattgctgtttgagatgaatattctatcgaaaggccacttggttgaagctgaacgtgctgatcttgtaggagagtacatcggccatacagcccaaaaaacaagagatttaataaaaaaagcaatgggaggtattttgtttattgatgaggcgtattctttagctcgaggaggagagaaggactttggaaaagaagcaattgatacgcttgtaaaacatatggaagataaacaacatggttttgtattgattttagctggatattcaagagagatgaatcactttctttcattaaatccagggcttcaatctcgttttccatttattattgagtttgcggattactcggtaaatcagctattggaaattgggaagagaatgtatgaagatcgtgaatatcagttatcaaaagaagctgaatggaaatttagggatcatttacatgcggtgaagtattcgtcgcaaattacatcgtttagtaatgggcgatatgtacggaatattgttgaaaaatcaattcgtacacaggcgatgcggttgttgcaagaagatgcgtatgataaaaatgatttaattggaatatcgagtatggatttgatgctcgaagaggagacgcacagtacataaactgtgcgtcaatttttgtgtataagttcgtttactctttttttgctttttcttggtgtgttttatggaagtgttccattttagcgctcttttcgtgtgctgaattaggatcgtgtccaaattgatttactgagcttttttgagctcctttattaacgtggtttgtcatttgtattcacctcactttaaaaattagtataaacattatataaagaaaaaatcgttagaaaagaaaaacctctttacgatatgtaaagaggttagattgctatttatgcattgaacgttctttcgtttcgatacgtctgtgcggtaaatgccatttgtaatgaatagaaaccatgcggaagcaaacaattaaaatgaatagaatgtaaagagcccaatcgctaacaataatttgagctccaattaagaaacctgctaaaattgtccaaaaggcatatacttcagctcgaagaacgagaggttttctgcgggctaaaagatcgcgaatgataccgccgccgataccagttaaaacagctgctacaattgtggcgctaattggtaaatttaatttttgggcatataatgctccttgtacagcaaatgccgataagccgatagcgtcagtgatattttcccactttttccaatgtctaattaacttatttggaaaaagaaaaataatagtcattgataaaagtgcgatttggaataacatgtcttgttgccaaaacgcgacaatcggataaccgattaataaattacgaagggcacctcccccaaatgcggttgccattcctaaaatatacaccccgaaaatatcataatcctcttccattgcaacaatggctccgcttagtgcgaaagcgattgtgcctatgatgctaaaaatctcccatgccatgaattttctcccccgctaactagatgaaatgtgcttcctctgctattatattagaaggtttaaatttcgaaaaggatgagtgaacatatttgatggaagaaaaagaaaaagtcatattagtaggctgtcaattgccacaagatgatgatgaaaaatttatgcattccatgaaagagcttgcatcactagcgaagactgcacgagcagaattgttagtgtcaacaacgcaaaaacgaccaaagtttcatccggcaacttacataggtaaagggaaattagaagagcttacaatgttaactgaagagttagagccggatgttattgtatttaataatgaattaacgccgagtcaaattcggaatttatcctcagtattagatgcgagagtaattgatcgaacgcaactaatactggatatttttgcgcaacgtgcgaagtcgagggaaggtaagcttcaagtagaattagctcagttgcaatatacaatgccgcgtcttatggggcaaggattgtccttatcgcgtcttggtggtggtattggaacaagaggaccgggtgagacgaaattagagacggatcgtcgtcatattcgatcgcgtattgatgaaataaagaaacaacttgcagttgttgtggaacatcgaaaaagatatcgtgagagaagaaaagataataaagtatttcaagtgtcattaatagggtatacaaatgcagggaaatcgacactgtttaatagattaacggaagctgatacgtttgaagaaaaccttctgtttgcaacattagacccaacgacaaggaagatgccgttaccttctggttatacagtattactaactgatactgttggttttatacaaggtttacctacttcattaatcgctgcttttcgttcaacactggaagaagcgggggaagcagatgtcattttacatgtagttgattccgcggatcctaactacatagggcatgaaaaaacagtaaaaagattattatcagaacttgaaattaaccatattcctgttattacgttatataataaaaaagatgaattacatcaaaactttattccgtttccgaaaagtgatttcttaatgactagtgcttttgaaaaaagtgatttattgcgtataaaagaagcgatagaaacgaagatgaagaaagaaatggatcgttatcgagtggaaatccctccgagtgaaggtaagttgttaacgcttttaaagacggaaactctattagcaaagatggagtttctagaagataaatttgtatatgattgtgcagggtatatttttactcattcgtcgcttaatgtgcaattaaagagatttttagtggaagaaggagaaaataaaaatgtttgatcgtttgaaaaatggagaaaaaattgctccaatcgtaaaagaagtagagagtcagattacagaagtacataaacgtgcggatgaagtaattgaaagcaatcagtttcgtgtattagaaagttttcgtaaacataaaattagtgactcgcattttatcccgacaacaggttatggttatgatgatattggccgtgatacgttagaaaaagtgtatgctgatgtatttggggcggaagctggacttgttcgtccgcaaattatttcaggtactcacgctatctctacagcgttatttggtattttacgcccgggagatgagttattgtatatcactgggaaaccgtatgatacgttagaggaaattgttggtgtgcgtgggaaaggtgtaggttcatttaaagaatataatatcggttacaatgcagttccgctaactgaagctgggcttgttgattttgaggctgttgcagcagcgattcataataatacgaaaatgatcggtattcagcgctcgaaaggttatgctactcgtccatcgtttactatttctcaaattaaagagatgatcgcgtttgttaaagaaattaaacctgatgttgttgtgtttgtagataactgttatggcgagtttattgaagagcaagagccatgtcatgttggtgcagatttaatggcgggttcgcttattaaaaacccgggcggcggaattgttaaaactggtggttatattgtcgggaaagaacagtatgttgaagcgtgtgcatatcgtttaacatctccgggaattggcgcggaagctggagcgtctttatacagtctgcaagaaatgtatcaagggttcttcttagcgccacatgttgcaggacaagcgctgaaaggtgcaatttttacagctgcgtttttagaaaagttaggaatgaacacgtcaccagcgtggaatgcaccaagaacagacttaattcaatctgttcaatttgacgataaagaccgtatgattgccttctgccaagcgattcaatatgcatctccaattaattcgcattttactccgtatgcaaactatatgccaggctatgaagatgatgtaattatggctgcgggaacatttattcaaggtgcaagtattgaattgtctgctgatggtccaattcgtccgccttatgttgcttacgtccaaggtgggttaacttattcacatgtgaagattgcgatttgttctgcaattgatgcattaattgaaaaagaattattaacaatttcttaaggggaagctgtcgatttcggcagcttttttcgtataaaagtaatgatttatgcgattagaaaaagaatgaaaaaattcataaaaaaaattataaaaaatcatgtaagaaaagctaacatctattgacactaaacataacatagtataaaatgagaagcagttaaggcgaaggaggaactgaaaaatgaaagaagatagacgttctgccccgctgtttcctattggtattgttatggatttaacacaattgtctgcacgtcaaattcgctactatgaagagcataatcttgtttctccaacccgtacaaaggggaatcgtagattattttcatttaacgatgtagataagttgttagaaattaaagatttgttagatcaaggcttgaatatggctggtattaaacaagtgttactaatgaaagaaaatcaaacagaagcagtgaaagtaaaagaagaaacgaaagaaatttcaaaaactgagcttcgcaaaatacttcgagatgaactacaacatacaggtagattcaatcgaacttcattgcgacaaggtgacatttcaagattttttcactaaagataactgattctgaaggcgattagagggactaaggaggaatttataatgtctagatacacaaaagaagatattttccgtttggcgaaagaagagaatgtaaagtatatccgtttacaatttacggaccttttaggggtaattaaaaacgtagagattccagtgagacaattaacgaaagctcttgataacaaaatgatgtttgatggatcttcgattgaaggtttcgtacgtattgaagaatctgatatgtatttatatcctgatttagacacttgggtaattttcccttggacagctgaaaaaggtaaagtagctcgactaatctgtgatatttacaatgcagatggcactccatttgatggagacccacgtaacaacttaaaacgtgtgttaaaagaaatggaagctttaggattttcagacttcaatcttggaccagagccagaattcttcctatttaaggttgatgaaaaaggaaatccaacattagaactaaacgataacggtggatacttcgaccttgcgccgatggatctaggggaaaactgtcgtcgtgatatcgttcttgaacttgaagaaatgggatttgaaattgaagcatctcaccatgaggttgctccagggcagcacgaaattgactttaaatatgcaaatgcaattcgctcatgtgatgacattcaaacattcaaacttgttgtaaaaacaattgctcgtaaacatggtttacacgcaacgtttatgccaaaaccactatacggtgtgaacggttcaggtatgcactgtaacttatcattatttaaaaatggtgagaacgtattctttgatgcaaacggtgacttacaattaagtgatgatgctcgtcacttcatcgcaggtattttaaaacatgcaccagcatttacagcgatagcaaacccaactgtaaactcatacaaacgtctagtgcctggatatgaagcgccttgttacgtagcatggtctgcacaaaaccgtagtccgttagtacgtatccctgcatctcgtggtattagtacacgcgtagaagtacgtagtgttgacccagctgcaaacccatatttagtaatggctacattattagctgcaggtcttgatggaattaaaaacaaattaactccaccagcagcagtagatcgtaacatctatgtaatgacaaaagaagagcgcgaagaagcaggtatcgttgacttaccagcaacattagcgcaagcattagttacattacaatctaatgaagtagtatgcggtgcactaggagaacacttacttgagcacttcatcgaagcgaaagagattgagtgggatatatttagaacacaagttcaccaatgggaacgcgatcaatatatgtctctatactaagaggcttgaacccttgatacaactcgtatcaagggttttttaattcccaattattacacttttatgtggttgcaaaatgaaaaaagccacataaaagccacgaattaataacaagtagtgatatcatagaaaaacattatcagataaacgtaagttttatataatttgtgaaatgaaaaagccttgatactacggtatcagggcttttttagtgaagttattggatatattaactactaggcaatggattatttttggttattttgaatcatgttactaagaaaatcttttcaaaagaattgattttatctttttttaaatcacttgtgctataacttaataattctttactgcttgtacaacgcgaccaatgatttttacgtcctcatctgcaaggctgtaagtttgtggcttgtgaatcgaatcattactcaatgatattaacgtaatgctgcttagttataacatagtcttattcaggatttcgttagttcattttctaaattttggaaataaatatagcttagtaccttgcaataaacaataccgagtggtatattatggataagataggtactgtgcattgaacagtactaagataggaaaggaggatggcacttgaacgttcagtttaaaaaaggtgtgcttgaactttgtgtattagcacttgtaaaacgtaaagatagttacggttatgaacttgttcagcaaatttctaataaatttttaatatcggaagggtcagtataccctttattacgtcgtttgacgaaagaagggtattttcaaacgtatttaaaggaatctacggaagggccacctcgtaaatattatcaattaacagagcaaggggagacgcaatttcatttgttagtaacagaatggtgtgattttgcgaaaggggtacaagaaattattgaaggggtggaatgggatgagtaaagaagggtttcttaaagaattatcaagttatcttagaaagttaccagaggaagagaggcaagatattttattggattatgaagagcactttcagtttggactagaagaggggaaaactgaatcagaaataatacaaggccttggttctccgaaagtaatagcgaaagaattacttgcgatgtatcgcttcgatgaaatgaaaaaaaatccatcgacttcaaatgtgacaagagctgttatggcagcgattggacttagtttgtttaattttattattgtgttaggaccgttagtcgcaattattgcttttatattttctttttggatcggtggtattgctagtgtagtaacaccatttttcgttattggaaaagtatttatgggtacttttatatggttggatcttttcgttagtataacgtttgttggagtaggtttattgttatgtattatcgctttttatagtacaaagtggtttaagagattgtgtgtacgatatgtaatatggaacttcaaaatgataaaaggagagtaaatgatgaaaaaactatttttaatcgctattgcttgtatcattattggagtaataggaatttcccaaacatatgaaaaagcagtacaaactgctaaaaaaggcgataaagaaaatgtaattaaaaacgaaacattaaaaaatatagaagttaagttagatgccggggatattattgtccaaaaatctcctgactcttctttttatatcaagcaatcaggagatgtacgtaaacaagagattcgtatcgcagaagatggtgacacattaaaagttattggggaaagagaaaaaggtgcttcatttgatttttctttttacgattttaggtttcaaacgtctaaattgactctccttgtgcccgaacgctcttaccaagatgtaaaagtaaattcatctgctggacaaatcgagatgagtgatgtgaaaagtgatagcgtaagtgttagaacacttgctggagaagtagagttgaaacaaataacggctaagaatgtggagggatcgacaaaagctggtgaggtgaattttaagaaggtattagggaaagtgaccgcaaaaacaacaagtggggaaataaatattcaagatcatgattctaagtataatctagaagcaagttcaactgcgggagatatagatattactttatcggaaaaaccacaagatgcggtaattactgggcaaagtgctgccggagatgtaacgatttttaatgaagaaaataaaaacgtaacaattggaaatggtagtaaaaagattagtggtaaaacggctgctggagatgtgacgattaaaactcgttaataagaaatagaatgcatggaaatctatcaaaatacaaaaaagaagataattaccgtatataaataaggtaattatcttctttttattattttttaatgtaaatcacgatatacgccaattactttcccgataactgacacttgttttaaaatgataggttctaatgaagaattttctggttgtaaacggaaatggtctttttctttatagaaacgtttaacagttgcttcattatcttctgttaaagcgactacaatttcaccattatatgcagactgttgttggcgaacaacaactaaatctccatcgaaaataccagcttcaatcatactatctccagaaatacgtaacatgaacacttggtctgctccagcaacaatactagctggaagtgggaaatgttcctctacgctttcgaccgctgtaattggtaaaccagcagtaacttttccgacaattggaacttgaataacagattgtgtttccgtatccattcggtcttcacctaaaatttcaatggcacgtggttttgttggatcgcgtcgaatgtatcctttttcttctaatcgtgataaatgtccgtgcactgtagaactagaagcgaggccgactgcttgaccaatttcacgtacggaaggtggatatcctttttcttgtacttttagcttaataaagtcgagaatgtcttgctggcgtttcgttaacttttccattttttctaacacctcgttttctttcatttttcttattaataagtataacatgtgaaaaaacattctacaaacataagttcgaacaaatggcggatttatgttacactatagggaaataatagggagaaagaggggttcaaaatgaatgcaattatttatgcacgtgtgagtacaacgaaagaagcacaagaaacatcattattacgtcaaaaagatgaattattgcatttagctgagcgctatcaaatgaatgttactaaggtgattgaagagcaggctagtggatatacaattgaacgtgacggtatattagaggtgttggatacaattcgagacgaacaaattgatgtgttacttatacaagatgaaacgcgtcttggtagaggaaatgcgaagatcgcgttaatgcattgtttacataaagaaggcataaaagtatatacgcatacacataacggtgaattacaattgtcggattctgattcgatggtattagatattattggtattgttgaagaatatcaaagaaagattcataatatgaaaattaaacgaggtatgcaacgtgcagtagaaaaaggttatcgtccagaaaaaaatttaaaaaatcgtcatttaagtgtaggaagagagaaaaaagaagtgccaattgaggaaattgtacgtttgcgaaaaagtgaactcacgtttgaagaaattgcagcaacattacgtggatttggtcataatgtttcaaaggcgactgtacatcgtagatatgtagagtatacgaagcaattgcttgataaagaagagtaactattgtatgataataatcagttttgattagaagggggattcgagatgattaatcacgaactcgttgaacgcattaacttcttagcgaaaaaagcaaaagctgaaggtttaactgaagaagagcaacgtgagcgtcaatcgctacgtgaacaatatttaaaaggatttcgtcaaaatatgttaaacgaacttaaaggtattaaagttgttaacgaagaaggtacagatgttacaccgacgaaattaaaagctttaaaaaagcaagataatgcaaaattaaattaaaagatgggcgaagcccatcttttttatttgtaaaaatcgttatttaataactttccagttgttattaactgttgcttctatcgttttatgttccaatatataattagcgataagttcagacatatctgtgggtatatcttttactactggtttgttttgaaacataaagaaatttcccccgccacttgcacgataattattcattacaacgtcatattcttcattcatattaagaggagcactgttatgctgtaaagattctactctttcaccaattggttttgaaatgtttaatacgtatgaaatcccttcccacatatcataattataatgttgtggctttggttctatgtaggtaggacttatggtgattgatccatctgtttttaatgtgaaataagaagcagagagttcaagagcattttttatatctgctccagttattttaattacttttaatgtgtttggataaatataattagaaacgatatcacgcattgttacatgttccgggaaacctggagatgtattatggaacaaacttgtacaagaaattgatacattagctatattcatctgtattttatttatgaattctataaaaggatgatcatgcaaacgagtttgcatagcatctgaaatttgcatgtccccttgaatgattccaataggttgatcaagccacttttgtgttttcttttcgtaatcggctaccaatgaaagtacatcttggtccgcctcaaatccttgtacagataataattcagaagaactctcttttttcacccatttatgtttcgttttttcgaatgttacttttacttttccaactgagtgtccattgcatccggtctgtaaaattgttacaccgttagccattgtgtgagaaatttcccggtgttggtggcctgttaataagatatctatgccttcaatttcatggcacattgcatatccttggttttctcctgttaacacttcagtcggtaccccggtttgtaaatctcgttcaactcccccgtgatacgctacgactagtaaatctggtttctcatgttcgcgaatataagaaacccattcttttgtagtctttaatgcatcttcaaatagtaaatctttaatgtgatgggactgttcccaatttggtatgtaatgtgttgttaccccatgcccatcaacttaaggatagaaactctacggttttccattaattgaaatgttggctcggtagctcagtcggtagagcagaggactgaaaatcctcgtgtcggcggttcgattccgtcccgagccactctcaggatattaagtgggcccacttaatatcctttttatttatgtaattttacaaaactgagtagttattttaaaatagaacgaggagcctctagcagttgaagctagaggtttttctatagatcgtataggatgccgtgtaaaagtggatcatacatgagtctatgagaatagaggagaaaatacttaaacaaaggatgcggtcatataggacatactatgtaaacatcaatatgtttagggattattgaccatatttttataaggaggaaatagacgatgatgggaaagaaaattttagtagttgatgatgaaaagccgattgcagatattttgaagtttaacttagaaaaagaaggttttgaaatagtaatggcacatgatggtgatgaagcaattgaaaaggctaatgaagagcaaccagatatggttttattagatattatgctaccaggtaaagacggcttagaggtttgccgtgaaatacgtaaaagctcagaaatgccgattattatgcttacagcaaaggactctgagattgataaagtattagggcttgagcttggggcagatgattatgtaacgaagccatttagtacgagggaattacttgctcgtgtgaaggcgaatttacgccgccatcaacaaggtggtgctgcggaaaaagaagaaaatacagaaatggttattggaccaattgtgattaatccaaatgcatatagtgtaacgaagcgcgaggaaaatatcgagcttacacatcgtgaatttgagttgctacattatttagcgaaacatttaggacaagttatgacacgcgaacatttattacaaacagtttggggttatgactattttggagatgtgcgcacagtagacgttacagtacgtcgtttgcgtgaaaaaattgaagataatccaagccatcctactttaattgtaactagacgtggagtagggtattacttgcgtgacccagagcaggaatagtatatgaagaaagttggtttttttcaatctattcatttaaaatttgtgcttatatatatgctattaatattaatagcgatgcaagttattggagtatatttcgtaagggaattagagaagagcttagtacaaggttttagggattctttaacgcagcaaacaaacttattatcatataatttgaagcaagagtttaaaaaaagttatacaaaagcagaaacagagtcaacagatgaaacgattaaaacttcaattcgaaaatttgcctctgatcagaagaaagttatacaagaggtaagtgtatttgattcgcacagaaagttactggctatttcagatgaatcaaagcagaataaggtgaatcgaacatcaactgatatagctgttcagcgagtgttagtacaaaaaaagccagaagtgaaaattgagaaggatggtagtacaggtcatcgtgttcaagttatgcttactccgattctagatgataacggtaaggatgcgcttggtgttatttacattgtggcatctatggaagatgtatataaacaaatgaaggatataaatcaaatttttgctacgggaacagtaattgctttattagtaacggccgtacttgggattttattggctcaaacaattacaagaccaatttcagatatgcggagacaagcaatcgaaatggcaaaaggaaattattccagaaaagtaaaagtgcatagccatgatgaaattggacaactggcattatccttcaataatttatcgaaaaaattacaacaagctcgttcttctacagaaagtgaaaggcgtaaattatcatctgttttatcacatatgacagatggagtaattgctactgatcgaaaaggggatattattttactaaatgaccctgcggaaaagatgttaaatgtttctcgtgaaacagcgctcgatcaatctgttttagaggtattaggaatacaggaagaatttacgctcgatcatttatatgaagagccagattctgttttattagattttagtacgagaaacgaaccatatattttacgtgctagtttctctgttattcaaaaagaaacagggaaggcaaacggcttaattgctgtactatatgatgtaacagagcaggaacgtatagaacgggaacgccgtgagtttgtggcaaatgtctctcatgaattaaggacgccattaacgacgatgcgcagttatttagaggcacttacagatggagcatggcaggatccaaatattgcaccacaatttttaacggttacacaagaagaaacagaaagaatgattagacttgtaaatgcgttgttacagctatctaaactggatagtacagagcatcgtttaatgaaagaatgggtcgactttactgatttctttaataatattattgatcgctttgaaatgtctaaagagcaaaatgtaagtttcaaacgatctttctctaagaaatctagatttattgatatggatactgacaaaattactcaagtgctgtataacattatttctaacgcattaaagtattcaccagaaggtggaacagtaacatatcgtttacgtgatcgcggtgatttattagaaattagtgtaagtgaccaaggaatgggtattccaaaagaaaacgttgataaaatctttgaacgtttttatcgcgtagataaagctcgttcaagacaaatgggtggtacgggacttggattagcaattgcaaaagaaatgattgaggcacatggtggctctatttgggcgaagagtgaagaaggaaaagggacaactatttatttcacgttaccaatggcagcagatgaagaggacgattgggaatgagtatggaaaactttaaaacaatagttttaattaacctagttgtaattagcctatttcttacttttaatctatggacgtatgtgccagattctacatccatgcaaaacgcgaaatttgtacaggggaacgaaggaatgaaccaaactaaaatttccgatgttgtccgtcctacttctatcatcgtgcataaagataaaaatcattatgggagcagaagagaggcagatatagaatcaatctataagcctctagaattaggggaactacatgattttagagagatatcaatcactaagggtgatttcctttcatatgtgcatggtgaagggaaagttgaacttgttttccctaccgatatcccatttgatgcagttaaatccatgttcaacatgaaagagaaaagtacagataagcctaaacattttaatcgtattctccttgatccttctagaagtaaggatcaagaaattaaaattaactttgtttctgatggtgataactttaaaatatacgaggcaaaattaagtggcttgtatttaaaagatattgtaaatgcccaaaatcaatttatagtatcagcaaaaccttattttgattatcaacttaatgatatgaaaaaattatttttaccagatggaacgacagagttaagcaatataacatatatttcatctaatttagcagttgatacgtttaagaatgctctgtttagtgatcctcgttatttaagtccgattaccgagatgtcgaaagaaacatttacagatggtattagatccatggaaattgaaaacgatcgtcacatgctaaagtataaaaactcttctgtcttaactgagaaaacgatagataatttaatgcttttacaaaaaagctttgaatttgtaagtggtcacagtgggagtttggattcatatcgtttggactatatgaataaaggagagacagtatttcgcttaaatgaagatggatatccagtattcaatgcagatggattagcggaattaagacaagtatggggatcagaagaagtaatggaatatgaaagaccgttgctgtctttaaatactaaaggtatagaacagaaggttactcttccgtcagggcatgttgtaatagcatccctagaaaataatccagagataaagaaacaagtaattaaggatattggcattggatacaagttatcactagatgggcaagtggttcgactacaaccaatttggtatgtaaagcttgttgaagatgaaacaggtaaacagaaaatctatgagtggagtgagggaggactaaatggattgggatcggattaaaaccatatttattgtgaccttttttgttttggacctctttctcattttccaattcattcaaaagcaagatagtaatcaattggagcttattgcagaaacaaagatagatcaagaattaaaagcaaataaaattacgatgggaaatatccctaaagaaccgaaaaaagagtcatttattagagcggaaaataaagcctttaaagaagaagatatacagtctttgaaaaatcaaacggtgcatatacaaaatatgtacaagatagaaagtaagctaaaagagccttttttaaatacgaaatcattatcaaaagataagtataatgaatttttgaagaactatgtattggatggacaaaagtatgaatttggagcggtgaaagactctaaaatttatttcttccaaaaatataaagataagcctattttctataataatcaggcgatgattgttgtggaattaaatgaaaaaaatgaacttgtttcatatacgcagacaatgctaactgatttaaaagaaatgggcgaaggtgaaaaaacgaaagagcaagaaattattacggctcaaacagctttagaaaatttgtatttaaaaaataaaattcatggaaatacgcatgttaaagaagcgcaaattggttatgccactcttaccgcatctacttctaataaccaagtacttgctccaacgtggaatttaaaaacggagcagaagcaggacttctttgtgaatgcaattgaaggacaagttatggaattaggagaaaaggaaaatcgagtggttgatgaacatactggagtgagaaagaatggggttgcattttagcgtacttgcaagtggaagtacaggaaatatgctatacgtaggaaccgatgaaaaaaaattactagtcgacgcaggtttaagtggtaaagcaacagaggctttatttaaacaagcagaactgaatataaatgatgtatcaggtattcttgtaacgcatgagcatagtgatcatattaaaggattaggtgtattggcacgtaaatatgatttgcctgtttatgcgaatgagaaaacatggaatgcaatggaacatttaataggaaatatcccaactgaacaaaagtttcttttctcagttggtgatgtgaaaacatttggtgatattgaagtcgagtcatttggagtttctcatgatgcggcagaaccgatgttttatgctttccataacaataataggaaattagcgcttattacagatacgggatacgtaagtgaccgtatgaagggcgttattaagggagctaatgctttcgtatttgaaagtaatcatgatgtagaaatgcttcgtatgggacgttatccatggagcattaaacgacgtattttaagtgacgttgggcatgtttgtaatgaagatgctgcattagcgatggcagatgtaattacagatgagacaaagcatatttatttagcccatttaagcttagataataacatgaaagaactagcgcgtatgtcagtatcacaagtactagaggaaaaaggatttggagtgggtgaatcctttgaaattcacgatacagatccaaaaatgcctacaaaaattcaatacgtataattcttcattttagtaaacaataaaggtgaatatagttgttttcaggaagataggtgaacaaatatgtcctttattgatgaagaaagttatcgtatgaaacgtgcaggaaaaaagaagcacaaaggtatagttttttctagtatagcgggaacaattgtaggagcttctttatttgcgtttggagcgcctttattttcaaattctgctgatacgcttccgcaagctgaagcaagcggaagtaatatggctgaagctcaagggattaaacagattagctttgtagatgctgttgatcgtgcatctgaagctgttgtgggtgttattaacattcaacgagataacttttcagaggcagattcagaggccggtacaggatcaggagtaatttataaaaagacagatggtcaagcttatattgtaacgaataatcatgttgtagctggagcgaatcgtattgaagtaagtctaagtgatggtaagaaggttcctggaaaagtattaggaaccgatgtagtcacagatttagctgtattagaaatagatgcaaagcatgtgaaaaaaataattgaaattggcgattctaatactgttcgcagaggagagccagtcattgcgattggaaacccacttggactgcaattttctggaacagttacacaaggtattatttcagctactgaacgtattgtccctgtagatttagatcaagatggacattatgattggcaagtagaagtgttacaaacagatgcagcgattaatccggggaatagtggcggtgcgcttgtaaatgcagcaggacaattaattggtattaattcaatgaaaattgctgcaaaagaagtagaaggaatcggccttgctattccggtgactagagctgttccgattatgaatgaacttgagaagtatggaaaagtaagaagaccttatattgggattgaacttaggtcattaaatgaaattccaaactattattggtcaaaaacattacatttaccaggtactgtaacagagggagtttgtattttggatgtgaaaagtccttcgccaggtgcggatgctggtttaagagaacatgatgttattgtggcggtagatggaaaaccgattcgcgatattattggattccgtacggccttatatgataaggaaattaatgataaaatgactcttacgttttatcgtggtacaaaaagagtaacaacaacagtgaaattaggcattcaaaagtattaaaaacaggagggcctacctcctgttttctattgtagaaaagtgaggtgtagaaaatgaatttaccttgttgtttagaacatgttgaattagcgttagatattattgtggatgagtgtgaagtcgcaccagttatcaacaatgtggataacttagaaaaagagaaaaaaacatgtgaattttgtcaaaatgaggcgacatatgttgtatcgaacacagattcccacacaatatgtgggtagcgtttgtggatatgtggataagttttgtggataacatgtttgtaaggtggaggatacgtgtgaatatctcgattatttcaattgggaaattaaaagaaaaatatttgaaacaaggtatagcagaatacttaaaacgattatctgcatacgcaaaagtagaagtgattgaattgcctgatgaaaaggcgccagaaaatttaagtgaagcagaaatgttaattgtaaaggaaaaagaaggtatacgtatactggataaaatttctgatgacacgcatgtgattgcattagctatagaaggaaagcaaaagtcatcagaagaatttgcggtaagtctagatcgccttgctacatacggaaagagtaaagtcgcatttgtaattggtggatcacttggactaagctcagaagtgatgaagcgttcaaatgaatcactttctttttcaaagatgacattaccacaccaattaatgcgattagtgttgcttgagcaagtgtatagagcgtttcggattaatcgtggggaaccgtatcataagtaatgtattctatgtaaaacactgatattatcatatttattttattatgcctataattggaggctatgtgaatggtaagtgatcagatgagatattctagactcgcaaatataacaaaaataataaatacgaaattagaactacgtgacgtattgcagcgtgtgacaatggcgatatcagaggaaattgttaggtgcgatgctgttggaatttatttacctcaggaagatggaacatttagagggtttgcaggaaaaccagagactataaatggcgtaacgcttgatactcaagtaattgatcctgaaatagacttgctggcaaaagaggttattgaaacgaaaaaacccatctatattcctgatacctcaaaggatcatcgaccagatccgagaccggttaatgcattcaaaattaagtccttattagctctgcctatctcatttgggcaagagttatttggtctagtttttttgtttgattatggaattccgatgaacttaacagattcagaaattcaaagtgttgaagcttatgtaaatatggctgcggttgcaattcaaaacgcaaataatttaaaacaaaaggaaaatcttattgctgagaagcagctgttactaaatgttacacgtgatttatcaatgtgttcctcgatacaggagagttttgataaatgctttttttacctagaacagattttagagagtaaaaatatgactgcccatcttctagatccgctaaacaaaacaacaattaaaacaacgaaattaagtaagggctgtcattggacagaagcggattggacagagaaaagctatgaagccaagatccaagaggttattcaaacaaaaaatatagatagtaagggtctattgatgattccattggtttcaatgggagaagtattaggggtaatcgtcgttggcaaagaaggaaaagctcacaattatgatgattcccaacttcaactagcaaaatctatcgttgatgctacagcccctacgttttcgaatttgttatatatggatcaactagaaagcatagtggaagagcgaacgagagagctagctgctgctaatgaaaaagttacaagtgtgattgaatgtattacggatggattttttattttaaataataaatgggaatttacgtacgtaaataagcaccaatattttccgcaaagaaaaacagcaaaagatgtattaggaaagaatatatgggatgttttcccgagtgaaatcgacacagttatgtataaggaatttcatcgtgcgatgtcagagcgaactacagttcattttgaatttctttctactgcagatgaatattggcacgaagttattgcatacccgtatgatgatggtatttgttgtatttttaaaaatataacggaaaaaaagaaatatgaacaggaattgaaaagattatccaacatagatttaatagggcaaatggcagcaggtatcagccatgaaattagaaatccaatgacaacagtactaggatttttacagttattaaaagaagataatgcctatgagaaacataataagtactttcatttaatgattgaagaacttaaccgtgccaattctattattactgaatttctctcaatgggtaatacaaggaaatcggatttgcagatgttagatttaaattcaattatccacgatattattcctttaataaagattgatacgtacaatcaaaataaatatattcaagtcgatacaaatgacattccagaattacttttaaatcgtaatgaaatacggcaattattaatgaatctatatcgtaatggcttagaagcgatgaatacagggaaagttctaaccattagcacttacaaggaaggtcaaaattgtgtggtgcttgcagtgcgggatcaaggaaaaggtatcaggcctgaagtattagagaaactgggtacgccgttttacacgaccaaagataatggaactggattggggttaggtgtatgttatgccattgctgcccgccataatgcaaaaatagaaattcaaacaggatcggaaggcactaccttttttgttaaatttaattatgaaaataataaaaaataaccttatttagaatagttacgatgaaccgtatcataaataaatttattctttgcatataaaaggataaaaagaccattggacaaaaattaccgatggtcttttaaatattattagatggtatgtagatttcctaaaataagtatgtttctatttccataaaaatatgctgtaatatgaagaggaaaaagtataagtagttagagaagtgaggaattaaaggtgaagaagtttaagaagttttacttggagattacgagtgtatgtaatcttgcgtgtagcttttgtccgccgacggaaaggcagaagcaattcatttctgtggaggattttgctaaaagattagaccaaattaaacctcacacagactacatttatttgcacgtgaagggtgagccgttgctccacccgaaaatagatcaactattagacttaagtcatgaaaaagggtttaaagttaatattacaacgaacggaacgttaattaataagagaagacataggctgttaaataagcctgcgttaagacaaatgaatttttcactgcatagttttgatggacatccaggttcgcaagataaagagggctatgtaaggagtatactttccttcattagggaagcgacaagtcaatcagatttaattgtatcgttaaggttatggaatttaactcaggataataaaacgaatgctgaaatccagaaaaatagagagttattatctataattgaaaatgaatttgatctatcttatcaaattgaagagaagcttacaccaggaaaaggtataaaaattgcagaacgtgtctttattaatcaagactatgaattccagtggccagcattacatgaagaagaggatgatgggaaaggattctgtcatggacttcgtaatcaagcgggtattttagcgaatggaacagttattccttgttgtttagatggtgaagggattattaaccttgggaatattaataatgattcattttctaacattatcgaaggtgaaagagcaacaaacattgtcgatggattttcgaaaagagttgcggttgaagaactttgcaggaaatgtggatatcgcaaacggtttgggaagtaaatatgaaataagccctcataaagcgagggcttattttttatacttgataagaatgctctaatttatcaattaatgaaccaacgtaagaaacagctttacggattgcgtctggttttgacatatctactccggcatgtttcattgtaccaccagcgatcaatagcgggttgtccttcctctttaatcatttgagctactgcagtggatgcagtgtgtgctgccttttttgtagtatttctagtaacgatttacggaaaggttcaagttttgtttcttcagttaaatatttttcaattgttccttcgccgaatatgaggatttcattatgaataaaggatagtgcagtatgtactttcgtccataaagcagaaattttggaagagttcgcttgaatacttggatttgtacgatcagtagattcttttaaatttgcatatgagtacagttttgttaacgtcattaaaagttcttcttctaaaagtaggcaatttaataaagtgtgggagctagtatgtaaatgtcctttaaatgaatcaagtttctgtatatcattttccaatgcgtttaatgcagtatgctattcggcatcagaattatacaaatcggataaatcccatgttagttcagcaggtacctctgcgcaattaagacgattttctattacatttttcaagtcgtatatcctccttattaagactatctaaaaatataatgatagaaaattcggttaaattaaaatatttttcatttttatatacaaaaaagaaggacaagcatgaaaatgcttgtccttcaagttaatttaagaattaatatactttgtcaccattgaaaatcgagtttttcacgacaacataatctacagtacgaatagcatctaattttgttccaccagcgtaagagatagaagattgaagatcttgttccatttcgattaacgtatcttctaaagaacctttatgctcaacgaacattttcttaccttcaacgtttttcttctcacccttttggaattcagaagcagaaccgaagtattctttataaagtttgccatctctttcaattgtttcccctggagactcttcgtgaccagcgaatagagaaccgatcatgaccatagttgccccaaatcgtatagatttagctacgtcgccgtgtgtacgaataccaccatcagcgataattggcttacttgcagcttttgcacaccagcgaagtgcagctagctgccaaccaccagttccgaagcctgttttaattttagtaatacaaactttaccaggtccaataccaacttttgttgcatcggcaccagcattttctaattctcttaccgcttctggagttccaacgtttccagcgataacgaagctctctggtaaatgttttttaatatgttgaatcatgttgatcacagcattagaatgaccgtgtgcgatatcaatcgtgatatattcaggtgtcagttgctcagcagctaattgttgtacgaattcatattcgtcctcttttacaccaacgctgatagaagcgattaatccacgtgattgcatatctctaatgaatgagattcgtttctctggttggaaacgatgcatgatataaaagtagttgttctcagctaaataagttgcaattctttcatcaataatcgtttgcatatttgcaggtacgacaggtaatttaaatttatgttttcctaaagtgacagttgtatcacattcagagcggctatttacaatacattttgcaggaattaattgaatatcttcatagtcgaatacgttttccatcatttacacccctaaaatacgaatattttatttttattaattaaaaatgttcgtccataggataatttacattatttttattaagaagtcaaagaatttcttaacattttttgaaaaagtagattttatacctgaaaaacaacgttaaaaacgaatttaaaacgtttttttatttttattgttcgtttatgaaaaaggttgaaaaattaagataattacacaaggttgtatgtattctttttatttttttggagtggatgtaggatactatgaaaaggttaatgctaacaatgcaagcaaaagatgttatcaagtagttgaacaatatatgaaatgaaaaggtttgtttctatataaaaagatgaatctggcatgattcaccttttatgtaaggtttcaagtataataagtagggtgatagtaacgtatacaaaagataaaaaagaaaataatacagaataaaatgaggttaatatatgagtaaaaaaagtttttctgattataaattaagtaaggaaattgtaagggcacttactgggttagggtatgatcatccaacagaagtacaaggtgaggttattccagttgcattacaaaagaaggatcttgttgtgaagtcccagactggaagtggaaaaacagcttcatttggtattccactttgtgaaatggtggagtgggaagagaataaaccacaagcattagttttaacaccaacgagagagcttgcggtacaggtaaaagaagatattacaaatataggtcgattcaaaaggattaaggctgcggcacatgcccatcaacttaagaatttgcactacccccaagtgtcaaaaaacgttattcactttcacaagcttcatttttcccattggatctggcaatttcttatttcctatttcaatttctacttctgcatctttttctatttttacagttattttatcttttaataattcgtaacctttaggtgcttctacttccactaaggtatagtttcctattggtaagtcttttgatattacttctccttcttcatttgttactagttctccaactattttcccatttaaatcttcaattttaaactttgctcctgctagctttttatttttatcacttatgtctactttcacaagcttcatttttcccattggatctggcaatttcttatttcctattttaatttctacttctgcatctttctctacttttacagctattttatcttttgataattcgtaacctttaggtgcttctttttccactaaagtatagtttcctattggtaagtcttttgatatcgcttctccttcttcatttgttactagttctccaactattttcccatttaaatcttcaattttaaactttgctcccaccaattttttattatcattattactatcaaccttttttatttttacttttcctgtactaggcttgttccaatgtttccagttaaatttgaaattgtgaaactcaaatccaccagtttgttgtaccgcaccaacaaatgcttgtccattaatcgaaccgccttttgtttctaatacagcattgggagcaaacacactcccaactacaccatatccctctgttgtaatttttttcgcatttggaaaaacccaaatcattttcccatatagctcagtaaacggggaattaggcgaatatggttgtgatgtaggaactatatctgtagcctttccaatattgttcgtgtcatatagaatagacccatttttaaatgtaacctctattgcatctgaatacattacaataaaatctttgtccttagcattgggcaaaaatacatctcttatatctacactgattttccctgtcaattctgatgaaacataaatattaggattgtttatatcttttccgattccatgactcatatttggaattggggtattcgttttatattgacctgcatttttactaacttggttcactatattgcgaaattcattaaatttcgcgtcaatttctagtttttctttataaacgatacgatcataagaagattgtatgatgcgatctggatcactctcttttgtcattacgactattccgttttgaatgataaaagattcttctcttgatttttttagttttccagacaataacaaggacggatatccctcatcaacccatttttcacctactatattagatgttcctgctgctgcacctacaatcgtataccccgatgcatccatatcaccttgaactgcaattgctccttcaatgtcgccacctattgctttatggttaccaaagacaacagcattataacgcgatatatctcctagaccttctaaggtagtcgtggaaccatatgcttcttttggtacatatacgacaaaacttacacttaacattaacaaaacaataaaatgaatacttaccagctttaatcgtagcctcaattcctttgttcccacctttaccgtatttttttataatcgaataaaatgaatttttattaatgatgatttacttcatcccctatataccgtctttacttatctttgaatttccggtcccacttcccattaatgcaggataaatacattctatcgagttaactttttcttataaattacgactagaagcacacataacaataggattgtaactattacagtccacttattaaatataaatatctctgtactcactttttgtttttctttcttgtttaactccacgcgctcacctcgaactagcaatctattggtgtttactccataaggcgtacacgtaattaaagttgtataatctttattttctacaatttgtagatcgtccgtttcatgtggtaacactactttaatttgatctactttataagcaagaactttgtctaaagaatgaatataaaaaagatctcctttgctcaacttatctaaatctgtaaataattttgctgatggtaaaccacgatgccctgttaaaatagtatgcgtactttctccacctaccgggagcgaagaaaaatctaaatgacctatcccgcgacccaatacttcctcagaggtcccttgatagattggcagttttatattaattttcgatatttcaatataccccattacatctcctaaatttaacacatcagcatacgcttgatgattactttttttttcagaaaatggatctgtaaatgttttcgcagaagtttgaacttgtttattatattcggctgcttctttttccctacgttcgacttctttcttttgtaatgctttaatcttcttatcgtaagagctaatctcagaataatgtgcacgagtcgccaaccaattactaatagtaggatataaaaaaatacctaatccaaataaaaaaataccccccaaaacaagatttcgtttcatatttccacctctgtatatgcttaaatatcgaaaagagggaagcattttgcttctccccttttcccatagttacatgttcctaaaatcttaatttctagcaaacttttttctaaagaaaacaaatgccgctgtaagcattaacgtaaggcctattacagtaaaaagagtcgttcctatgccacccgttaccggaagaatccatccacttttattattttcaatcgtcaatttaaccgtttgattattttcactaatctttacatcaatggggtcttttaataattgataagatgcttttgtaccatcttcttttgtatatgttggtgctttcgtttcaaaaatttgatagtctccatatggaatgttagaccatttaataacaccattttcatctgatacacctgttacttcttttcctgctacgacaactatttttccattattatctttaagtacaaactctgcaccttttaatttattcttattagcactatcaatttttgttaactcaattattccagttgtcggaataacaactacaggtttagattccttttctccaattacatcatttttatttgtaaaatgtatttttgctgtatttaaaatttccgaaccagatggtactccttcttttacttgggatttaatttgcaaatgaaattcttttttaccatctaattttgtgaaatcttttactgtagctgttactttttgaccttctatagctacctcaacaacgtttgcatttacttctgctccatcaattttcacgattggctttccttgaatcactaaacgattatccaaagtatctgttaccacatattttttgtattccttaatgtcttctggaattaatgttttaatatcataattataattagttaacggatttatcggtaacgcttccaattttccgttaatttttttatcaattgttggttcttcattgtttttcacttctattttaactactgtaccagaagtaatagttccatcttcattaattgttccggagttcttaacaaaaaactcacgtttagttggatctattacgtagcctttcggagcttttgtttcttggaaatagtattcaccatactccaatccttgcacgcgaatatgaccattagcatctgttactaactcttttttcacttctgtaccatcttttttaaataaagagaatactgcacctgctaatgctttttcatttacaccagtttttattaaatccactgcaccacgtttaatctcatttttgggatacatgtgaacatcatagtttagcaccttaccctctttattcgttaatgggatatccactgtatacgtattgggatttagattaacatgtggaggtcctgccacttctttcacctcataacgtcctagcggaagatcttttaatacagcttgtccgttatcatctgttactacttgatttggagtggctcccattacaggtttcacgtcttcttttacgattttcccatcgtttgaaattttttcaaaagaagcaacccttttcacttcaaacgttacaccttttaatggtttcacatcttttggcacctcttgatttgcagaaccgtcaccttctagtccctgcgctccatctttttcttgttcatacttatgaatcgttaaagtacctttagatggtgaatctgcctttactaatacactagaccatgtagaaaatgttaagaataacactaaaagcacactaaatatttttttcatttctcttatcccctttactacttctatcattttaaaaatttctttattactattaccttcttaaaagcaatagtgtgccaagtatcagatttaaacgaataacataaaacatagtcgtccaacaatccattgtttacaatcacttattcacttttcttatcttctattattacgttgtctctccacatgatatatgtaattttctcccctaaattacacgtatatccctatttcaagaatcattacatttgttacataatagctttcactgctaatttcgactagtcacttactgtcaatctattcatatctcacttcctatccctatttaaaatccaatcttaatcattttttaatacatataagtaataaccaacaaataagtgtgacgattcatattttacgttactgtccaaaactattacctgtatattcaaataatatgtgctattcatgttaaattatggtattattcttagaagtttataacttttatttatattttttattgataaaggttttccgtatctacttatgaaaaaggaatatatgtttatttaactattacgcataactgtaaggaggaagaatatgactaaaaaactcagtctagttgagatagagtacatttgcaatatgttttttcaatctttcgaaattccagtttgttttttagattgtaacaaaaatattcttttagaatttaaatccaaaaatgattcacattcgttatatacatcaaaaatagaacagttacatatgctttttcagagaaatgatacatataattcccccatcttcagaactcacgaatatctagggcactttattttaattcacataaagagcgattatatggtgaacggtactgttattattgggcccttgacacatgtaaatttttctacaagtaaagcggatagtaaccttaattttattccaaattataaaagaacaagagaccattatttttcattgtcagtcaaagatcaaaatttctttgtaaatatagcgatattgttctataacattctctataaaaaaaattcagatgtaagcaccttttcaaataacagtgactcacttcatataagtcatagcagcatcttaaacgaagatgtatatatttcaatgcaaaaagacgaatccatttatcataatttatatatagagcagcaactacttagttctatagaagacggggataaagaaaccgtactcaaatattattacgaattccaacaagagactctttcatctttatcttcattccatcaattaagacgtcataaaaacatttgtatttcatccatcacgctcgctactagatatgcgataaaagggggacttccatctgggattgcttacaaaatttatgatttacatattcaaagaacagaagatttaaaagacaaagaatctgtttgggatttattaaaaaatgctttttgtacctttgcagaccgtgtaaaggcacaaaaaacacagcaacattcacagactattgctatttgtaaaaactacatttttaaaaatatttacaatccaatatctgttaaacaacttgctaaatttgcaaatgtgaattcagattatttatctatattatttaaaaaagaagtcggtatttcattaattgagtacattcaacgtgaacgagtcgaagaagcaaagaaattattaactttcaccacctatcccttatcagatatatgcgcttcgcttaattttagcgatcaaagttatttcactaaaatttttaaaaaattcaccaatgaaacacctggtaaataccggaaatctcatgttgtcatttagagtgacacttccattaaaacaaagtgttttcagtaacttatcaatggcaaattagaagtactcctatattcatgagctataggatttatactattttcaaattaaaaaacacgttactattcttttattttaatgagaatagtaacgtgttttttatgtaatatagttctgtagacagaatagtatccaactgcaaatttttataaaagccaaatgtaccgcttaactattaaaatcttaataagtaaaaaatccatatttcgttttatttactttctactttatttcttttgaatactgaactcttttcttcaaacgaatgatccctactattatttttgtatctttctaaatttgcgaatcaaagtgagtactgtacctgcaataatcatcaatatgccgattgctgcactgttagttgtacttacacccgtctttggcagctccttatatgtatattcttttttatcggtattactgttatttgagatattattgttatttgtcttattagcaagaccattaggtttgctagtttctttatctttcactaatactttttgtatcgtatttacctcattacccacggaatctcttacactatatattatttcataaataccggctttatttgtatctatagttccttcatacgctactttagaagtaaggtcaccgtcttctttgtcagtagctgatactcctatcaacggatcaaattgatcaccctcagtaattgaagttgtagcaggtacttttagtattggtttatcatttttaacttcttctctaactttgaccgttacagtttgcttcgccgttacttcatggccttttgaatctgtaactgtgtattttaatacgtaagtaccggctttatttgtatctacttcaccatcaactttgattttagaagtaagatcaccgtcttctttatcgatagctaatacttctgccattggaacaaatgaatctcctacatgaattgtcgctccaacaggcactgttaatttaggttctaaatctgatgtttcgccatttccctctacaattacagtctgtgtagccgttgcattccccccttgagaatcaacaaccaagtattccacaatgtatgtacctggttttgaagtatctacatcgcctttatgctttactttatttgttaaatcaccatcttctttatcaacagcttttacatttctcattggatcaaacgtatcacctacacgtagtgtaatcgtaaacggtacagttaactctggagcttggttttctgctgttttttcgttttctttcaccgttcctgtaatttttgccgcatcaaaagcattttggactgcttgaacttcaattgagttcgttccatatttattagctgcgactttaaggcatgccaatttcaattcagagaaatcagaagtcatgtttaattcatcagtatttgcataatagaaaatatcaaacattttatcttcaccaataccatttacatttacaccgttatgagtaccaccttgtgcaattaaatacgcaactttattaataatacttgaattaaaatgtacgcctccataatcctctccatttaaatcattatatttactataatcatcgggatacggtagtccttctgaaaaattaattgcagttggatttttcatattacgaaaagtcgatccagtttgctctcctattgtccagttaaattccccattatttatgtatttctctatagccgttcccataatatccgataatgcctcgttaattgccccagattctcctgagaattcaaggttagattcacttgatgtaactgcgtgtgtaaattcatgaccggctatatcgaacgcttttaccataggatctccatataaaagcatactgatgttattaatattagtactaaatgcattctcccaattttcaggatcatttgttcctccagaatcccatgcatgtacaactgaaactactttttttcctttattatcaaaactattacgattatatttttctttataaaaatcatatacctttgttgctaagaaatgagcgcttaccgcctttggatcattaaatgttgttgaagcgctagttgctagtatgccaggataataactttcttcatttgtaatatctctataatttacatcatatgtctcaattccttgccctcttgtgtaatcagcaagcgcataattcccactggtctgtttagaaataccaaatgtacgagttacgcctaaatcatcttttcctgttccagttaatgatgtgaaattgctagttttattttccttaacggattcaacatactcttcacttattttcaaacttgattcttgtaccatatcttttaacatatcgccattatgagcattcactaaataagttccagatacataatttggtgttgtagcagcaaatgtaacttgatatgcattgctagcctgcccatgattttcatcaacaaaaataaccgccttaacttctggttcagaaataaatttaatgtcgtttccgtactttttataaatatattgtttcgcttcttcttttgataaattaataggtttctttaaatcttcttgtgttaaattttgtgcgctagctcctgaaatgcttttaataataccttttttatctacgtgagcagttaactggtggccatacacttcttttccttcatatatttgttgcatgcgcacaagtgtagttccatcataagaaccacgtttttgaagaaccttgtaatctactcctgtttctgcactaacttgttttggagacaaagcatgctccgtattttccttaagtgcatctttcactacattctctggcgccttttttgatggttgtgtaagatcacctgtacggaacgaatcctcttgaatttcaacttgcatttgaccaggttcctctgcatgacctactctatatggtgttacacttgttaaaacaaatcctgttgttaatgcaactatagctatttcttttttatttctcatggtatttacctcgtataaatttctattatttatatgaaactgctaaaatgtatacaatctattcctaacataaaaagatgacttttgtaatctacaaaagccacctcttcaatatataatatccctaaaatgtttttaatacataatttctatacaaaaaagaaaaaagcattcattaacgagcattttgcaatacttttattaggtcatttatattttcaactttctgctgaaactgatcaaatctgttatgaagcgatgaaggatttttatcttcagttgaaataacttgttttaattcattttctaatttatcatacatatcaaaaaaattatcaaattctacacttacaagctcttcattttcgcgatagaatctttttgcttctaaataagtcatatatgatttatttaaaaatcctaatgaaattaaatatttagaagtgttttcttgataaatagcaatatcacatgctattttaatatcagaataagtcttttgaacgagacaatgcaattcaaaaatcttaaactttaatccattattcatttcatcccctcccatcgtatctattctacataaaattagaatattatacaaagaaaattattagcaagaaattgacaattaaaaaaataacttaaggataaacaaaatccctctcattataaattataattgcggagcatttaccaacataacagcaaaataaaaaacgaaaagaataaatctttccgctcttagagtaataaatacatttcatattgcgctaaagaattcttttcaaatccacatttcttaaaaaaaccctctaataaattattgttaggaaacccaattgataaacttgataaatttaattcttctcttgctacttgtaataatttcatcccaacaccaatatttctataacctttgtctacgaaaataaaactaattttaccttgttcagttacgcatagagagccttttaagtcattatcaacatatgcaccataaaatacattatttgtttttttgatataatcaatatcattttgccaatttatatggaagtttaaccatttctgaatttcatctttaaaagttggaaattctaattgttttacttcaatatccttacaaactttattctttattttagtcaaatcatttaaattataataagaaagatcgtacactttttcatagcccaacttattataaaaatgaatcgctcggtcgtttcctacaatgacttcgagaaaaagttgcttacatccatgttgaatcgcctcttctttatgcagttcaaataatttttgactcacaccaataccgcggtaattaggatgaaccgctaatgttccgcagcgcatagtctttatactttcataatcctttatgccacctagtattacgccaacagatttgccttcttctaaagcaagaaaagaatgttctagcaaattaccttctggtcccaaaaaacggtgtataaaatccccttttgaaacttccatcttaataatataatcggaaaatccatctttaaaagcttcatatactaaatcaatatttacttcactacaccttttatattgaatcatataaaattgccctccaattgcttgtattaacctcaacgtgtacccatataatatattccatctattataaatttcagctcttaatttgaaatgaacggacatttccctacatataactcacttttaatttgttttataacaaactatctattatttactacattaatctcataaacacgcaaaaaagcaattaaatgctcacatgctctttcgcatgctagcattttaaagattttttgttcttctttcgttttatcattagcctgatctgaagcagcttttaaacagagaaatggttttttatttatttgacacacataggcgaaagctgctacttcttgatcaactgccaatgctccatatacggtatggagtaaatatctcatttccgaactacgaatacgttgatctcctgataaaaatgtgccgaaatgtatcggatcatacgatcgtattttttttattcttcttacaagtgattttgttgtttcaataggtgctgttctaccgttatataaattaaaaacatcttcccctgaaccagcagcagtaacatcgtgttgtattgcgcttagtgccactacaatatgaccgttttgcaccttgtttgataaacttccgcatattcctgtcataaacaactcatctggctgaaactcactaattaacaattgtacacaactagcgcagcttactttaccgacaccagtaacaactgatataatttccagctcattaatagtatgaaaatgaaattcccaagctgctcttttttcaacacgttcacttggataatgttgatgcaaatacgtcagttctggttcccatgcagatacaattgcaatacgtttcattacacgcttcacttcccctattgtcatttaaatgagttatctatactttctcattcataatctggaatccattctttgtatttcttatataaatctcgtattatttctttattcttcgcaattacttcacatcctctatcatcatacataaacatgacaatatctttcgttgcatttatgagaaatacatttggataagaaatttctttttttcgtccaaatcgaggatataaatcaaagaaatcctcatgattagcaacttgtataagcgattcatatttaatatgttccgcaaggcattttaaagaaaaatgatatgtacaatataaatctgcttcttcatcttcaaataaaaacggtaacgtttcttatcttatatgaaatcttaaatctcttttcttaatatatttattgtatacatttattttctgtggagtttttatattttcctttttaaatctataaacatttgtcactaagaatataagtagggtactaatgtaactcctggaaatgtttgattcatatattcttttaattgcatttccttgtcctttctactgtacaattccttttaaatcccagtatgcttcttctagccacggatgtataactttaaatgtatctttcctttcccacaaatatgaaatatatacaaaagctgctttttccaaaaattttgccaatcctttttttatttctattaaatatggtggtgtcccgttttgatcccattctattttatctgcaacaaataatactaaatccatcttcgttgcatgtttacgcaacgttgtatggcaacaaattgcatttaaaatttcttcatcttctactttaaatatttcttttgcgattactctcgatagtttttgatgaataatcataggaaactttctttctgcttccactatttctatcccaaattcttcagcaactgcaatccgctcctcgttcggaaaaatgccactaatatcatgtaaatatcctgcaagtgctgctttttctttatctacgtgaaacttttctgcaatcttttttgcctcatttgctacacgaattgaatgtttatatgtaaactctttattatattttagtagaaaagctttaatatcattttctatttttccagtttgagtaaatgaatatatatcattacataacatagaaaatccccttataactacctttcattataatgtagaatctaaatatccttgttattttatattcgttattaatctttttactcctttttaatacgttacatgaaattttatacagaatcatcgctacaagtacataaatgtttgatattatagtaatgttgatgatttgtaaggaaaggaactacacaatgaataaaaacatattaattattgatgatgataaagaaattgttgaattacttgctgtttatttgcgaaatgaaggctataacatttataaagcttatgatggcgatgaagcattgcaaaaggtttctacatatgaagttgaccttatgattttggatattatgatgccaaagcgaaacggattagaagtttgtcaggaagtgcgtgaaaataatactgtaccaattctaatgcttagtgcaaaagcagaagatatggataaaatattaggtcttatgacaggtgccgatgattatatgatcaagccattcaatccattagaattagtagcaagagtgaaagctttattacgaagatcatctttccaaaacgctacttcgcaaaagaatgaagatggtattattcgtattcgctctgttgaaatacacaaacataatcatactgttaaagtaaatggagagtatattaaactaacctctattgaattcgatattttatatttgcttgcaagtaatacaggaagagtatttagttcagaagaaatttttgaacgcgtttggaatgaagatggttacggttcaaataagactgtaatggtccatattagcaacttacgggataaacttgaaacagtaataaatggagaaaaatttattcacactgtttggggagttggctcatgcccatcaacttaagaatttgcactacccccaagtgtcaaaaaacgttattcgctgttttttgaatgtttggcttcgctgtatctaaccagtaatttgcattgattcgtgacagttcctgattcaggtggatatttttgattaattctcctcctcctgaacctaaatcaatgttggataaatttacattcggttgcttaatcatagtttttgcgtacaaatccattacaagaatatgagagcctgtttcagccaacgctttctttaatccttcaggtcctaacgcataattttctattttctgttcttgagctgtctgttcttgtgcaagtgcatgaatagtactaccatttgtagcggttataatcgttgctaaagtagctaaggttataactttaaatggaaatttcatcatttgattctcctccttattttccgtttcgttataattttttaataaacctaatttcttaatatcaaaatttataaacttgttcttcaagttgaattgttacactttttaatcgtcttaatatatctttttgagcctgagtattattggtatcaacttcagtcgataattttgtaatactattatttattagatccaaatcctctttgtaacgtttcattagctcaatttctccatctacttggttagcaaatgtatgcaaatcattttgcatgaaaagaatcattgatttttgtaaatctgctactgttaatttagttgttaagtcatataatttctgattttgtttctctaaatcatttaaatatgctctttgctcagctgttagtttattaatttcagcaaaagtattatatgttttttttattttttcaggatcaatcactttcataagatcatactctttcgtttttgtaactgcagctgcagcgatttcaccttttttacttttctctatcgcttcacgtgcttcttttttggcagcctcaatttctatagctgattttcctttttcttttgcttcttgctctgctttattctctgcgtctacaatagcattgtttatttcttttcctttgttatacgctactactgctgtttgagcagccggttcaatgatatcttttgatagactataaatttcttggaatacctttagtccttgttcatttaaagctcctggtaataacgctatttgctgtaaatcattttgaattgatttttttgtatctagcatttcattttttaacttatctatttttcctgttccctctgaattaaggacactttgtgcttttaccacatcagtatcaaggtttttcaacttcttatctaccagtaattttaaatctgttaactcattaatttgacgttgcacactttcttgatttgttatagtcatgtcttgaagaacttccagtctatctgtaaacccttctttatcttccttattatctacaaatccttttaatgttggataataactattaaatttagttacaaatcctttactttttgaatttaatagaattaatttaggataaagttcggatgaccactctttcatatcttgtttaattagaaattgagttgtatttaaagatggaatttcttcaaattgtacgttcggacttgctaaagctccatcgataaaggtttgtgttaacttggagtgtgcacctatttttcgtaatgctgaggaaatatctacattatcttgttttgtttctgcctgaacgattggcgttgctagagtattgataggaaaagtcgccccggtaacaattgatgttattaaaaatcctgtcataattttattcttcattccttacacctcttcactattgttttttacaagttttagtcgtaaatgttgtacaacctaacgttaggatttcttcacacacacttgcggatagaagtttttttgaaagagtaattgcatctcgttttttatttatttttgatagaatataaggtccttacttcccccccattttaatcactatgcttttcataagtaaactagaaaatcgcatatcttatgtttgatttttccgacattaaatattttgtttttttctaattatattaaaaaaatttccatactattatcacttcatgaagtgaaataattttactactataattaaacataaaatttgttggtatcattaattcttaataaatatcatgcaaaaaaatgttttcactataactttatgggattttatgtattatgtactttatatgaatatgtacaattgcatactcatatactctccttcaataacatacaaggtagtcactatacattcctatcaatttaagtttttttactcctccaagtgtaaaaaagtttttatttctaaaatttaactagaaaagatgatgttttttatagtttgttcgaactggagaatacaaccaaattaatctagataatatagtgaagaagctttttctcagaaagaaggaactgattctaaaaatgaaataactttattgctacttaacatttccttaatcggccttttagttcagatcttcttttcactataaaaacatcccttttgataaaaaggttccaaggaacaaaacatcgcaatttttttaaaacattacacctcttttgtaagcaatgtgactttatttaaaaagcgacattaaaaatttttttcaaaacctagaagtaacagtttgtccaaaacaaaaacaaccataagtttgccggtccggaaaacttatgattcatatcacacttattcttaaaattattcattcaaatcttctacttatattattttttcaagctctattacttttaaacaaattagaattccattttcatgtagaaacatataattttctttctgcttttttgtagaattgaaagtctaataatccttgaatctacggatattttttctaatatttatgattttctacgctctaacattaaatcttcccttttgagggtaagtctatttcctatttttgataacctataaaagttttatctttatttctttttaatatatacgatatatatttataatagattttatcgattctggaacgtgattgattttgtcctaatcaagttaaacttttttactgaaacaagatataaatcgtcagttttaactatatagttgagaaggaatggcataaaaaaggaggaaaataataatgaaatatcaaacaatattttcatcgttaaaaaaatcctgttttatcttaatactctctttcattatattaattcttgcacttccagcaccaacttttgcacaatccaataacaatgttacatctggaacagattactatgtatctccggcaggaagtgacctcaacactggcacattagatcaacctttcgctaccattcaaaaagctgctgacgtcgccacagaaggaagcacaatctacataagaagcggagtttataaccaaaaagtacatgtaactcattcaggaatctcagaagcaccgattacttttcaaaattaccagaatgaaaaggtaattctagatggctctaaagtcaagttagaggatgatggattatttaccatagaagataaaaattatattcaggtaaacgggttagaatttcgcaatttaaaatcaacgaaagttagcgaaacccctattggtatttatattaccggaacagggagtaatatcgagattagaaataattatatccatcacattgaaacgaatgtaaagaatggaaacgcacacggtattgctgtctatggtacttcatctagtgcacaaaataatttaaatcatattgtcatcgataataacgaagtagcaaatttgaaattaggactaagtgaagcaattgctgtgaatgggaatgttgattcttttggagttaccaataacaaggtgcatgataacaacaacatcggaattgttctgattggacatgaaggagtatctccagtagctgctttagatcaagcacggaatggaattgttcgtaacaatatcgtccatcacaattcatctttcaataatactagttataacgaatattcagctgatggtatttacgtggatggtgggaaggaaattattattgagcaaaatcagagctatgaaaacgacctcggtattgaagtagctagcgaacatgcggggaaaagtgcaagtcaaattacagttagagataatacaatatctaacaatactatgggtggcattgcaattggtggatatgacagtcagcaaggatacgctgaaaataacacgattaccaacaatttgatttataaaaatgacacaaaagatcaagagagtggtcaaattgaattaaattacgatcttcgtaacaatgtgattaccaataacgaaatctatgcaagtaatagtcgtatttttattagcaataattttaataaaaacactggaaacaaactcgattacaatcattactatggtgaattcgatcaaactaatggcttatggcaatggaaaagaaaaatgtataaaggattttcttcttatcaagcaggtatgaaccaagaaggaaatgaacaacatagtgtatttagcaaattaccctcttcattcaaactaatacagtagtctaatactaaattagtattacgttataaaaaagtacatgcaataggcactttaagaatactaataaatttaaccttattaaaacaaaaagagatgccctagtaccatacctagggcatctctttcattttattataaataatcttaatttctagaccttatacatccctaacaaattaacaattatccactatattttctacttaaaacatagtattattattagctgcttcacttggaatctcttgaattacatcccagtgctcgacaatctttccatccttgttacgaaatataccgactatagcaactcccttatcttgagaattagtacgacaatgtacatgaagagcaactgtatccccttcagctactacacgtttaatctctgcagaggaattaggatttttaacaaaatcctccttaaagaaatccatgaaggcttttcgtccatcagcaacaaaaggattatgttacttatactcttcacctacatatttttagtaaaaaactcatagttgaatttaatgtatctaattccttttattatcagaataagcctttacaacaactatttattattttttatttcattaattctgtaatttctttaatacacttaccattatccattgttatatctaatttctatttaaaacccttctttgtacgtttatacctatatatcgtgttaaattgtgtgtggcaagataaaataagctgttaaatttaattattgttaggtagtttctacagtatgatattatcacacaattagttatacatataaaaaaggtttcttgccttgtaacaggaaaccttttatgtattattaacctacaaatctaaaatttcaacaatctgacgtgccttagcattatctatataataatgcatctctaatcctcttctttctgattgaagtacggttcccctcaattttgataaatgttgtgaaacagtggattgggggagtcttaatatttccgttaactgtgtaacattgcatactttatggtgcattaattcatttacaatttgtaatcgaacaggatgtgccattacttttaatacatctacatcgtcttcgtggatttcagatagatttctttcagatattaatgttatcattttgcattctcatttattattaatttctattttccagttatccttataattaatacttatagctaattaccatttgtcctgttgagaaaatatattctctttttaaaacaaaaaggacaccgattaattaaaacgttttttaccgctttaattaattggtgtcctctaattttttgaacaaaatatatcttattttaaaggatattttcaattcttttttctcacgtctagtaaaattttatattttctttaaaattcatattaagaatattcttcaaatcctgaaagcacaagtttgcggcaaacttatgcttcatatcacattccacaccaatcaagctaattaacactatcaatgtagtgctaactatcttaattgaatattagtaataatgagtttaaatattatcaattaactttatattacatgtatgtaaaaacaatgacatgataagctttttcaaatttttctccttgtaaatatttgaaaatagtatttcaatactctccttactgttaatatgcctagaaaaagaaccccatagggttctttttctgttcattccctaaaaatctcatattaataaaaaagaagagggatatatcctctcttcaccaatacaatcgaacatctttatacttaaggaagggcatacattcatcaagagatgaaatgaacaataatagttcacctagtgaattataacacaaatccaattccattaatagataatattaacatttataggataattgtgacagaattgttaagcatcttaatattaaaaggttttatatgtatgtaaattgaaagtggatagtgtaagaataaaatataaggaggatataccatgtttaacaaaaaacaaacattcgtaacaacggtaacaactttaacactaggatgtggacttacattcggattaacaccggcctttgcagattctaacaagatttccgccaataatattcctgttcatactattcagaaccaagaacaagaaccttttactggatatgtcatttcagtagagaacaattatttagtagttgcagctacgcctacaaaagatgaagctcttgcttatcaacatgattggtgggatctagtttctcaaaataagattttaagagttcctgtttcagatgatgaaaactacacattaggtgagaaattaaatgtatatgcagctgcatggactaaatccctaccaccaatagctgttatgcctacaattgaaaaagtatttcaataggtaatatttccaataattaagctatcccatataaaaaggagtcgaataacgactcctttttatattctacattcccttggattccttaccttctcgtacccctaatatttaataacatgcttctttctccctagctaaagatgatatagaggttatgtcactcgcttctttcctttcttctatggaagtagctattatactagtcgagtatcaaacatcatcattattttatagaacaaataagacatcttcttaattcatgctctaattaaaaaagagatctaatacatatctctttataaaacatatttaaaaataaaaaccaaaggacaacaagcatatctcttttgttgtcctttagtttttatcgttgcctattccatattgtactaaattttttattttactctattatagaatgagaataaagtttgattaaaacatcaatctgacttaatttttttcctaccaaactaaattatgctgtaaattccttatccatttagaatatagtatttagtaattcttgttctggactgaattttttagtattatagccatcgattaaacttccttatgtatattctctttataaattgagtaactaaagcatacattgttaaaattcccaataaccacagaaaataataaaatggaagtggggttaaaccaatttgagtacttaaactggtaaatggaagggaaatccctataaacataaccaagcctgtaagcatcaaaactggcctagcagccgtactttgtaggaaagggatatgttgagtacgaatcatatgcacaattaataattgtgttaataaccctactacgaaccaacccgtttgaaataaggattgcatctcaggaatatttgcaccaaatacattccacattacgataaaaatgattatatcaaaaacactacttaccggcccaataaaaataataaaacgaaataaatcttttgtatcccaacttcttggttttattaaaaattcattgtctactttatcccacggaattgaaagttgggatagattatatagtaagttttgacataatatttgaattggtagcattggaagaaaaggaagaaatgcactagcaattaataaacttaatacatttccaaaatttgaacttgctgtcatcttaatatacttcagtatatttccaaacgttgtccgtccttccactatagcatcttctaaaacatgtaagtctttttctataagtataatatctgaactctctttaacaatatcatctgctgtatggatagatacaccaacgtcagactgttttaaggcaaacacatcgttaattccatcccctataaacccgactgtatgaccattcatttgaagtgcctttataatacggaatttttgactaggatttaattttgcaaacacacttgttttacttgcaagttttcctaataccttatcaggaagactatcaatttcataacccagtactggttctcctatatacaagcccattttcctacatacatttcttgtcacggactcgttatcacctgttaaaattttcacttgtactcctttcttttgtagagtatgaagtgcagcgatagccgattgtttgggtggatttaaaaaacctacatatccaacgagtatcatatctgattcatcatttatagaataacttcccactttatcactatttaattgtttatatgcaactgcaacaactcgcatcccctgctcttgccagagttcaattaggtgtttatttctacgctggatttcatctgtaataggaattatcttattattttcttttataaaactacaaattgatacaacttctctaactgcacctttacaaagcattattcgttcgttagcatttttttctataacaactgaaactcttcttctatcaaaatcaaatagacattcatctattttggagtattgagacaaatcatatttactactatcttttacataacgtataactgataaatcaatttcatttttattatttgtatggaagtaactatttatatacgctaatcttaaaacctcatccgacttctctccatttgtatctgtatggcgtaccagatccatcttattttctgtcaacgtgcctgttttgtcggtacagagaatatcaatagctccaaggttatgaatagaagatagttgttttacaagtaccttttttttactcatattaatagagcctttagctaaattagctgttacaatcattggaagcatttctggagtgagtccaattgctatagcaattgcaaataaaaaagcctcataccaatttccattaatacccccatggattatcatgacaataggagtcatgatgatcataaatttaattaatagccaactaactttgcttacccctttatcgaatttagaatcagatttcttgttcatcttaacctgattctttgctattgaaccaaagtaagtatctgttccagtacctacaactattacttttgctgtaccacttataatatgagttcccataaaacagagattttctaattcaattaaattttggatttttctaattttacgttttttgtacatatggaaatactgatttgatttttcaacgggtaatgcttctcctgttagagatgattgatttacaagtaaattttctgatgagataatccgtacatctgcaggcacaatatttccagcagataattctataatatcccctggtacaagatcctcaagaccaatttgtaactttccactttcctccaataaagttctcttattttctttataaggaatatttcccttcctgagaacagttaccttttcatatacaagattttttaatctttctatagacttctgagaacgaatttcttgtatgaaccgaattaatacgcttaacgtcaccatgattcccacaataatagtaccttttatatcattggtaaaaaaagataacattcctaatataattagaagagaaataaacggacttctaaaagaattaaataatgttatataccattttattcttttttgagaaactactttattttctccatacacttcaagcctcttagtagcttcctcgtgagacagcccttgagacgttgttttaaaaaaatctaacgttgatttaacatcactttttgcaatttcaattagcatattataatttttgcttaatacttcctgtttataaaaatattttttattagatctcaacaaatttacctcctatccaaataaatagaattcccctgttttaaaaaaataattataaaactacatttttataattactctgaattttcaattaaattcagaagttcaatagcacttaaatagtattattctcaccataaatagtaatttttatttataagttccctcttattagcaacaaaaaactactatagccataattttcaactgcaacaattgagctagcactatacataatcaaaattccaaatacaattgtaatgataagcgaaaacaccaacggatattccagtaacttgaatacttttttcatttctattctctctttctctatacttccaacgagtttgtctacaaactttgcgggaacgaacttaggtataaaaaaaacttaatataagtttcttataaccctagtaacatttttgcaatggtaaagtacagaattaaccccgttccatcgactaatgtcgtaatgaacggacctgagataacagctggatccagctttaacttatttaaaatcaagggtaatacagatgaaacaatggacgaccaaataacaatgaacaatccagtaatagctacaacttgcgcgacttctgtacctacgcctaaagtgtacgcacgaattaatgctgccacggctaatgtaagccctagtaaaaggcctactaatgcttcttttttcataacacgaaatatatctttaaatttcacctcatttagagctacagctcgaaccaatgtagttacgacctgtgtacctgtatttccaccagttccaattaacaacggaataaagaaagccagtgcaactacatgagttaatgtttcttcataatgccgaagtacagaaccagtatatgcttctgctacaaacagaagtaataaccaacctatacgtttacggtatatttgccaaatagaagtttcgaaatatggcttatctaatggggtgctccctcctaatttttgaatatcttcagttgcttcttcttcgaaaacatccattgcatcatcgaaggttataatacctatcatccgattatccatcgttgttacaggtatagcggataaatcataatccattagtttttgtacggcttcctgttggtctaggttcactgaaactgaaataacatctgatgccattatcgatgataaagttttatcatctgaagctagcaataattcacgaatagaaacaattccattaagctgaccacgtgtatccagaacataaatatacgaaattgattcaacccctgccccaatttttctaatatgcgacagcgtatctttcactttccaattttccctggcagcaatatagtcaattgtcatcaaactgcccgctgttccagattgaaaaaccagcagacttctaattctttgttgagattcttcagacaaaagttgtataagtttttcagcctgaagtggatgaattgaaagaattacatcaacaaggtcatcaatagattgcctagctaatagctcttctcctctatccacaggcaaattggtacaaatattatattgctcctctggtgtaagataactgagaattttcgcacctttttcagtaggaaaacattttattaaagatatctgatctttatgttgaaaaccttttatttccattgcaatatcgtaggattgaatttttataagctcttgcactaagtgtgtatcttttgttgctaataattgttgtaagcattctttcatcgtaattcctccttaaggacagtggtacttggtatcattttcccacttctaggaaaactaatttcttcataaatatgggatcaatatcatcaatcattagtcttccccccttttataaaagatttattacaaataaaattttgcatataaaaaacctcccttagtaattcaactaaaggaggttgctaaaaaagacatagctaaataaagctcattccccctagttgagttttggcactatacaacgtaaaggatgaatcattcatcacttagctatcttaagaagagccttaatccgacaattcctgttctacccattggcatctttcgatatttttgggcaatagcctgtgtttgtataggagcctcacctaacaggtcatagatatctcaaattttttgttcgtttcgtgttaaagcatatctactatttttgaacttgtcaagtaataacagaacttattttttcaattaagacaatatcaacaacaatagtaatttacataatgccaattccatcgtcttacgctatgattggctgaccgtttccatcaaattgtttccattcatattctagctaccgcttttacaacttcaggaggaacattttcttttaataatgcgttatgaggctttactcctcttctaaaatagcgtaataatattcgtcccaccattcattcccatgtggtatacacttcctgaaatagccttctcttctcattccaatcttctccatcactcgatatgatggtatattctgtggctgacatgtagctataattctatgtaacttcaattccttaaacccatattccaatgtagcttgtgctgcttcagaagcatatcctttattgaaatattcagggttgaacacccaaccaatctcataagtatgctcaccaaagtatttatgaaaaactatatgaccaatcaaaatatctttatcaattaatactacaggaaagttcttagcgttttcaccaatattttcatttacaaagttttttgtatcttcttcagtaaaaaaaccttcaggtatgtatttcataacattgatatctgatgtatactcatgaacagcttgccaatctttgaactcaaattttcgtattaataatctttctgtttttataaacatttacttttccccctcaaaaaattgcaactatattttaaatcctcatttaatccttaaactaaaaagaacttgtaggaatctctacaagttctttttagtttaaggtgaatatacgggccaaacaaactatcttacagattgactgtagaaattttaggggtaatgctttgacaaatatattatataacaaatattaacatctataggatttatttttaaaaatcatatgaattaagaaaggaagtagtttttttcttagatactattattaataactgggtatcattatatttcattctgcaacttatttagaagaactatgtacatttcgaagaagtttttcaataagttttgttttttcatttacctttgtggcatatgtgtagagtaaacatccagcgccttattacattcctgtgataggtttccacttaaatatgaagaaatggtgttctgctttcaccttaaaagaaagggattgattatgatcgatgcgtccctttgtatactcatacttccatccatccatcttttcttctttcattcttttctctatcccagggattaaatccaccctttttccattgtaatcatattgaaatcctcccttattctctgcgatttcaaccatatcagaagcaaagttatgtgctttcactaactgtattccatacaaaacaccttcgggtaaaaggctgattaataataaagaaagggtaaggaatagagctgtagttactgtattttgcattcttaatgcacctactctttttctttattttacgtttccacctaattgtttttcttttgcatttgtatcgtagataataatacttcttgctttactctttattgtttcttttttctcatcaaattgcttaaaataactagcagcttccgcatcaccttcgacagcaatcattgctggtttctcctgtacatcatagacagtaaagttacgttttgaagcaggatctttaaaatccgcattactgttatacgctttttcaaactcttttttcgctttttctgcatcaatagctatttcttcttctgcacgaagagtacctatttttacagacttagccaaagctatctcgccacctctttctaaagacgatttattatcggtatgtgttgtatctccaatcaccatatcagttacaaaaaatagacaacctacaaataacagcaacatacttgctgcaacaataaacttttgcatccctcttcatcctcccttaactttcagacttccgaaatcgaaaaccacttaaaatggtacttttcttttggttcaacaattggtttggtagcaataactctgctatttccttcattattccttctagctctttataatagttccgactagatagtaacgtactactatttaattgagattcaaatacatcttctatctcatatggtggtaaagcagttaataccttatctccaaaacattcttctactacttcatgctttaaaagagtaggcgaaaacttattcccaatgattctcgttttctctaaagctaagtaagaaacgagctttctctctttttgtgtaagaggatgcactatctttagcaattgatgcagatctggttccgctacaaagaatatgtaatccgccatttcacaaatctcatggtataaatctttatcccaatcgttccctgcatcaataatagatataggtgcttcttggttggccaataaaaccttaataaaatggtcaaaatcctgctctgtctcgttttttagctcttgatccacaataggattctttacaatataatttattttgccttgcttccattttggaattgataatatatcagattccttctgtagcatctctttatatctctgcaacataaattcactacgatagttttctggtgcctcagtatatccctttaataacggatacgtataaccatcatcatatagattctctatataattcacatcaatctgtagttcatttaaatacgcagctaaaagatgtgaaacaaaagtagcaccacttctcctgttcatgctggccacaacaattgttcttcttggaatagcaataccgatttgtttttcatataccggctcaaaagccaatttatactgtttttttataacaggtgcttttggcatcttctctgaaacggacttacgcttttgtttgtttttaaatagtttgttggaattagagccaggttcactgtcgccgcctccctctaattcacttgatgcttcttcttcatcaacaggaacctcgggcaactttgtttgttgcggtgcctgacttgctcctacgatttccgctacatttttaatatccgattcctgtagtagctgcgggatgactttattatcaatatcaattttacgagagttaaaaatgtcatagatacctagataaatcagtttcgccaaaaactcatcatcattttcacgctctgtaaataccacaatacgaatatcccgattaaagcgaatatctcttaatttctgtaagataatcaattcacgtttctcttcatgtcccgcatcaatatttaatcgtttgtcattaatacatagaatattgggctgttccgtatctagaatttcatctaggtacttgatgtgcatcacatcactatcagctacttcaaatcctgcaccaataaaatcctcacgcaaatatgccgtatatacagtatcgctaatagctaaaacgattttttttgtcataaaatcccctctctatagaaaaacacttttaaagtaataccatattttcaaacggcacctgtgtttcatcttgtaatttttttagtaattcagtaagaagtgcttctatttcaaaacctcctaaattacgtggggcattatcaagaagactgtattttacacggatctcaaagcgatcttgtatttcttctaacggcatgttaccaaataaaatttgctcatacaggaatccttcttgaagatccttttgtatattcgttctttctttatatacaatcgtaacttgcgctaattcaacaaatggattatctaaagttagttttgcattccaatttaaattccagatttcacattgtttttctgcatgtacaacatttgcagtaatagatggagtgatagtaaataaacgatcaataggtacatttgtaaggaaggttcttttcccttcttctatctgcagtcccttctcttctctttcatgttcaagtgccatttctgcaccatataatgcaatttcactaaagatttgttccataagtggcttaattccttcataagtacgaacagcaaatacgctaaactcctgggtttcatctgttctaattaattcataaatattaaattccgcagcatttacaattgcaaaaggaatatcttgtacaaaattaggattagtaaatagctcatctggtattactgtttctggatgtcttagaaactctaatcctagttggtatcccttaagaaatgcatttttactggcagctgggaataaagtttcaaattttttaagatcgtttttaaatttcttttcttcaatttcattaccaaattctctatcttgtaaaatatttgcttgatcagcaattaataaaaaatagtaattaataagagattctatttttgtttcaaaatctgtattgtctttacaatacttttcaaatctttctttgctttcgttaataatttcattcattttttctcgtctccttataaagattatggtttttaaacaaaaaaagacacaccgatggcaggttatgtgccttcggtgtgtccgtttagctaaaaattaaatctattaatttatatatttctcttagttaattgttgttcacatacaagaatacctctatgaattttaaaagtcaatacttttatcgaatccgtgtgaacatatatttactcctttttctctatttttgctatgtatttaatctaaaaaattacaataaattaaatataaataatcacaagtagtttatataagattaacaagatatatatataacttaacacaattattaattataaagagatttaaaaaatacctctaaagtcttgtatcacatacgttccttgctattaagataaattccctatcgtaatatccccaatacaaacaagccatacatcatataaatcacaaaataagaagttaaataccatattactcagaattcacaagtctaaaataatattactaagatactcacaagtaatgaatcgtattataaacaaactgaatcgtattcaaacatagcataaacagcttatatacttgcgtaaaaatgctcgtagctacatgttcctaaacaaaaaagcatgttttcaaagtaaagaacatgccaaataacccttgctttttagtgattttttaacaagggctgtttctatatttttttaaaaatactacataaattctggataatcaccatgttgcctatgataatttgttcttatatcgctgctttctcctacagacaaacttttctccttaaaataaatccaggcatctctaaactgtacacgcatgaatgctggaatagagaatatttcttgctctttcatacaacattcaacttgatctaatgcataagtcattgcatatattaataattcattttgtttttgtattgttggtaaatagattgcgatatcaacaatttcttgtctaaatgcagtcattatattttctttatctttttttcttaacgcttgtcccatatgtttcaaacgagataccgcttcttttctacacttcgctataggtctatgtaattcttttttatcattttcaataacacaattcgaagaaaaaatgacattaaacttttcaataataacttgttgtacctgccttctaacacgtgtaatacgagactcacttggtttcttatctttaggatctactgcattaaatttaataataggctttacaatctctatgtattgtcgcactttctttgcattacgcttcaactttttctttagaaaagccatttttctcgtaatctcgaaatcttcaatcttgtgcttataatgttccataccaatttttctcgaaaatgtgttgattaattctaaaagaaacataattcctctattatctcgagcctttacaaggctacttagtatagttgtttgaattaaataaaatggaatacggaaatacgataacgatatatttatcatatctgtagtttctgcagcagtgtggttgtacaatgcataatctacaatttcataaacagtacgatttccaacaggtgtttctcttacgagcttacgctccaagcaaacttgaaatcctgtataaattgttgtgtagggaatcccacttttcttagcaagatccattatttgaaattcacgtggcagcattcctatatcattgcattcaaagtgcaataagatataagtcgctaatgctgaggatggtaattctttgcgttcattttctagttttacaatattaaaaagtccattaaaaaacttaaccccatgaactttaaagttctgctgagaaaaattcaaacgtgtactcattattctaaatgactccttccgaaaagagcacaaaaaaagacactgtaatatcacatatacaaaaatctacttaaatctagatgatttttgtatatttctagataaacaatgctcaaaatacgcaagaaaatcgcctttttcagttgcacaaatttataagatcaagtaaaattatcttataaatttatacaaatcaaaaaaggttttgaagctaaagtttaatctaggtaatattgtaagtataactttcaatcaataagagtttgttgggttcctagagattaacctcgatgaaatagttggcgctattttatcaagctgaaagatcttttttttttgcttttttatgtttatttttagttaattgcggcaaaactataactatagctaagttttgccgcattttaatgtaatcatatatgcattttttggtacttgcaagacgattttttataaaatcgtcttttttttatataacaatttcctgtttaatacagttatgctattgttctattttcgaaaaaaagaagttttctagttttatattcttaaatacagaaagacttctaaatatattgaaccatatgcggaatataatgaatgttataaagcggtttcaaaactagaaaatatacattccaacattaacaataacccttatataacaacgttttcaaccaatacttccaattctaatttatcataaattagcatagtaaacaaagaaaaaaacatagaaatgattcagtaaagcaaacagcaaaaacatggaattaataataaaacgtatgaattctaagtttataaatttaagaatttataaatcatatgccacattaacctcattttctctatttttgtacaatgaatacgatcttaaaatcaatacaaaaagattactagaataaaagttaaaaaaagatataaacactaactaaaataagttagatgtaaatctagaaaagatcgattctatattgataaaaaccctttattttaaagggttatataccaatatacatattctaattttgaataatagtatttatacagattcctaaacttagtaagaaaccttgtgtttaatcaaacacaaacaaaagagttatttacagctcaacaacatactatttaggtcatttggttcttattatatcaatttcgtatttattgttactcctatgaatcacttaataaatacgaaattcactctattattttctattagtagctaaatctcaaactattatttgcttcatttgaatatatcgctataaattttcttgagtttttgcaaatttatattactcaagaaaatttatttttagtgagcgagaatcggatattagaagaaaaacttgaaggaataatcagcgagttcgagctataaaactagaactaaaactagtataagtttgttctagttttatattaaaccttgataaatcaatgttatcccttgttttattctatctaaattttgttagataaccatatagaagatacagaaaagtagaacgaatattagaatgcacaatactatagataaaccatgttatctatagatataaaaatacttgatttttagtggaattatattaagattttctagtttttctatggtagagtaatctataggaagataatgcccattctatgtagaatataacatggaagagactttctaagttttttggttgtaaggaggtgttgtttctatgagtgagaacaaaacaaacgaagaacaaaatgaatatagaatgaaagaagtatctgaacttactgggctatcgaatgacttattaagagtatacgaggaagagtttaatctacaaataaatagaactaatggtgggcatcgtcgctacacggaagatgacattaataagtttatatctattaagaagaagatccaagaacaaaattggagctataagaaagttcgctcttggttaaatggtgacgagcttccagtagcattagaagaacaccaggttaaaacaaacctagagaaaaaagtagagtatcaaacagaattaattcaagatttgactgaaaagttggatcaaagtatcaaactacaagtggaaatggtaaaacaaatgcatgagctaaagaccgagaaacaagagcttgagcaaattgtggcacgtagaaatcaggatcttatagatactttaattcaagaaaaaagaaaagaacgtcaagaacgaattgagacagaatcaaaaaaatcattcttacaaaaaatatttggaaagtaaactttgaactagattctaagtttggtttatttaagtagcaagtctaaaaatggacttgctacttttttattttgataattttaaagatgttattttttaaatgcctatgaacctattcaattattaaatatcgacattagatttatataaatatagaagaattttaacaaagataaataacagtttaattttcagtttaactttaggtttaaatttagaaaggttttagaaagatatatgtagctctagtgtgacttaaggtttaaaaaatagtttaattcttagtttaacttttagtttacataccatttccattgtgatataaataggttaggtgaatttttccactctcaagaattaataaaatagatgggagttaaacaatgaatagggatcacttttatacgttaaacattgcagaaattgcggaaagaattggtaatgatgattgtgcctatcaagtattaatggcatttattaatcaaaatggtgaagcgcaaatgcttaataaaacggctgtggcagaaatgatacagctaagtaaacctactgtttttgcaaccgtaaatagtttctattgtgcaggatatattgatgaaactagagtaggaaggtccaagatttataccttatcggatttaggcatagaaatagtagaatgttttaaacaaaaagcaatagaaatgcgtaatttataagtataggggaggaattttatatgttattaaacagtaatgaactagaacatatctattcagctaaccatagtgtaaatgatattagtattcgatggggagttattggtgctggccaaaaaggtaataaagaggctgatttattcgctggttacaagttttcgaatggagctagttgctatccgacattagctgttaactttgcagagtcagatatgatgcatttacaaaatattattaaagaagatcgtattcattttgatggtttaaagggagctgcacgtacacctgctgttgtgactgacttatttgacccggaaattaatcctaatgctaatggataccttgataaattagcacaagagctaggtcgaaagtttacaaatgaagagggagaggtaattgtagaccaattcttaatctgtcttggagctggtggtggcgttggaacaggttggggttcacttgttttacaattaattcgtgagcagtttttcccttgcccagtatctatgcttatttccttaccatccggtgatccagatgaaattaacaatgcacttgtattactaagtgaaattgatgaatttatgagagagcaagacagattatttggaaattctgatctaaagccattagcaaatgtaatcatcaatgataatactaaaatgcaacggattattgaaacacaaaagggcacgaaagacctgaaaaatagatatttaaactggaaagaagttgcgaacgataatgtagtgagtacgttacatgaaataaacattatcccagagaactatggttctgataacgttacatatgacccatcggatttaataaaactattaagtattccaggacgtttcttaacaattggaaaagcgagaattgctaaatttgatttacattcacttggaaatagtattaagagaagtttagaagagggattcttctcagcagaacatcaatttgaaacagcaacaatgtatggtggtttcgttttaagaccttctaacgcagatttcttcaaagatgttaatacggaaaataagattcgtaataccttaggagagtataaaagattggatgaaatcgctggtaaatttggtgatccaatttgggataatgaatatgcggtttgctacactatatttgctggtatgacaatgcctaaacgctatatatctcttgcgcgagaaggaaaagagttggctgaaaaacaagagcaattaagagaagaagcacaacgtaaacaggacgaagaaaaagtagatatttcttttgcaacgaatcgtgtacaaaagaacacattcaatccttataataaaaaccaaggatttggcggggcatcaagattcagtggtggtaaaaactctgcatttaaacgtcagactagtgaagttactacaacacaaaatcaacaagaagaagagaatattattagcactcttaaaacttcaaatccatttaaaaaacgttaaaaaaagcgggtctaaacgacctgctttttttattaaaatcacaaccgattacaataaaaaactacaatgcacaaattagatatctattatattttctgcatgtttaacacagatttatataatgtgatagtttaaatagattgttaggccgtcctaacaattttatttcaatcctttatcctttaaaaaattgttcggttaaaacatgtcttccgtccgaacaattttaaaaggaccaaaagactatataaatcaatgtttctagcagatttttaggaagagaagtaatccaaacttcagcgtacgagttttagtatctagattcgtgcaaattcagtttaaacttttcataatttacaacaaaattttgctgtaataagatatatagaaatggttgttatttattgaaaataaattcgagttatggagttgtatataatgaaaagtaaaacgtataaatatacaagtaaaggcacacagaaatcttttcgtttaaaagaggctgatatatttgtattcacatttttatattacaaaaggcatcttactacacgacaaattactcagctttatagtgcatttgaaggtagggatttttctgaggatagtgtgtttacaaagcttaatcgtttttcaaaatacggtgctatcttaactaaaaaaattgataaaagagatgatagtataaccagacgtgcgacattctccttaaaagatagaatggtcgattaccttcaagaaataggacggattcctacaggatcttcaaaacgtagatattcttcttcaatctcgttacatacactctgttcacgagaaacgttagtacgtacacttttagaagtatcgaaaaaaaccaatacaaataagttattatgtgagctagatattcgctcatatcatcaaaaacaaaagaaaacagaaattgaagatgcaggtttactcttaattcccgatgaacacatttcatatcaagacaaaaatatttacattgaaatggatatgtgcaaagaaacgaatgctaccttaattgaaaaggtggggaagtatattgaatatgcacaaaaaaacaatgagaatataactgttgtttttgttatgtatgacaaatcgatgtttcttgcagaagatgctgacccaccatacgtacgtatgaaaaatctcttattttctatgcgagagtatcatgaacttttaatgaatcttccaaatctaaatatacacatctgctctttgaaagaagctggagatgttatttcagatatcattctaggaatagatgataatcaaaactttgaacaagatattcttcaacctttatctcaacgtacagtaggagatgctgactggcgctacgcatatgttgaaaaagtccaaacatttaaggaaacaatagatggcggtcttagacgaacgtatagaagagataaagatgctatgcaagatttcttctttatttttgggaatgaaaatgattaccgaatgattgctagattagacgacgttgtgttttcaagaagagaaggcgatgaaggggtgccacttgttgtgatttatccaaagcgcaacaagggtagagatatacttttaatggacacttatgacaacgtattactgctatccctccaaaatgaaggtgttactatcgacgcagatgaacagatcatggcacgtactgcaaataacatacatccgaaaagacgcaagcttgttgaattatattaatcattaattttttatatacttttatacaattttattgatttttattatttaaggtgatagaattacgtttgaactaaacacaaaaaactacaatcaaatcagaacatatgaaattaaggcaagcgacacacgctgtttttacagtgggtgtcgcttgcctttttttatatggagaaaggtggaaaattaaaatggatttacaatatgcaactactacaactgagggagtgctctctgctagagaagcgtttaaaaaccctgaactagtcctcaaacatatgacagaagagggcgcaacgtttagcgtttctctacaagatatccagattccaggaaaaccgaattactattggtatgatgtaattattgaaacggcatcgaataaaaaaatagaagtaaatattgcagtactttcccaagaagaatataaccaactctgcgaaagagatagtattgatttatatttaaaacaaactgaagacgcagcaaaattcttttttgaaaaatcaaaggaattattccaaccagaattcaataatagattcaagtttaaacataaagctcaattatatctgtaagcggtaggtgagcctatatgcagacatttaaacaacgattaccgttatttactacaattggcttgattagcggatttattctttcatttggatttggtttagtaaactacatcaagttactctactatgcatttgaaccaccgtcttatcctatagaaattacatatgtaccgcttattttaatgttcttctctttacttttaggagaatttagttttaggttttacagccgtattcctgctttgcatgtgaagaatgggaaattaataattttgattgcttctcatattgcagttgatattcaatttttatggtttgcaactgctccgattcatgcaaaggttattccgtatcttacagataaatcaaagcatgttaattttggggagtatgaggccataggtcatgttttaacagggaattttcacacactcactatgatttttgtctttttacctacagtttttatgatcttgtttacactttggtatagtggtcatattgttcgttacagagaagaaatattaaagtgggtacaaaaatacgaatataaaaatcacaagttacaaaaatggtttaatagccaagaagaacagatataccctgatgtggaaattggaccgcatattgagcataaagaaatggtccggattaaggggaaagatagaacgttaaatggtatcattattggtccaattggttctggtaaaacatcaagtttaattattcctatgataaatcaagatttacactggatggtgcgtttcataaataagttcgaaactgcgtataaaaagaacgattatgatacagaagaagtaaaaggaacatttttaaatggtgtcactgttattgaacccagtaatgatttatgtcaaaaggtatataaattagttcaagcacataagattcctgcaagctcggtttactacattgatccaaccaatcctgataccaaaaatataaacattctgcgtggaccggttgataaagtagcagaagttttcgcaatggttattcaaggtttgtctgaatctaacaatgcattctttgaacaagcgcagcgtaaccaccttaagcaacatatctacttattaaaactgcataatccacaaaaagatgtcaccttcgacgatttgatcgagatgtatgtgcgcccataagggtagatttagaattgattaaatagcactaatctaggttaaccatttcaattaatggaaaaccgtagagtttctatccttaagttgatgggcatggggcatggccatcaactaataaaataataaaattaaaacacccttgcttgcagtaataaagtgaaagggtgttttaatttacgtctacaaacgagaaaaagcagttaaaataaagtaataaggtttacttcaggaaaataaggtatattatatttgttgagtagattctctttagagacaagaaaagtaggtgaacaaagtgggaaaatatcaattggattccaaaagtcaggtagctgtggcaaagttccatgaaaaacagaagcctgccaaatttgataaaaagcagcaacttgaaaaattgcgtacggagtatttgaaaaagaagcaaaaacaaacagataaataatatgttttattttccgaattttttctgtatgtaacgcaaacaaacacaagaaaataggtaagttattcatcattcaaatatatacaggctattttttcaaacctcttacttatgcaactaacgcatgcgtcagttcattaagaataactaaaaaagtcgattccttgagatgaaaaagagtaaacagtgcccttatcaggcactgttttattttgccattataatttcctccactgatttaggtaagcgatacaagctattccccacctccaaaagaatgaatcaagttcctcaccgcatatattaaactataccttttcttaaggagggctaccttaatgcgtactcctttatcctttgataaagaaactgccatactgttagcttcttgttgtgagttaacgtatgaacaatataaacaaaatggtattttcgaaataccagatggttttcaatatgtacaaggttttcaaggaaaggccattcaaacaacagaatggttcggatttatattagaatctgaggatacaattatcgttgccttcagaggcactcaaacagatccagattggattattgattctctcgtcaatcaaaaaccttatccttatgctttaaatggcggaaatgtccataacggttttctctctatttatgagtcttgtcgtgattctattatggatatgctcgtatcattgccagcacataaaaaactgctagctactgggcatagtctaggtggcgcgcttgccacattacacatattagatgcacgtataaatactgccttcgcacagtatggactttatacattcgcttctccaaaagtaggagatatcgcttttcgaaattattataaactacaagtagctagtagctttcgtttcgtcaacttattcgatgtcgtcccacttctccctccccgaaacataaattttaatgatcatgattgggagtatgcacacgtccatcacaacatgacatttacaaaaaacacaaaatccattacaaataatcattccattacaacatacaaaacatgtctgacttctcatttttaaccagtaaacaattggaaataaaatattcgtatactataataatctatgaagttatttttggatgaggggaccttacatgttaaaatttatcttcgcatttttccttattgtaatttttacggttacaggtttctttacattttcatactttgcgacaggagagtatgatggggcaggtatcatatataccactgttccatttctttcttaagcaaaataaataaaacgagcttaattttattaagcacgttttatttattaatatccatttctgttggtaaatcgataatatatctcccaatatagcaacctctttaaaactgtttaactgcattaccaataccccaaatttcattactgtactgcaaaatcgttcgatcgctcgcaaaatgaccagactgtgcaatatttaaaatcgacatttctagccacttcgttcggttctcataagctctaccgacagcttcttgtctttcagcatatggaccaaaatctcgcagaacgaaatattcatcattttgaataacgagagaatcgtaaattgcttcaaattcggctcccgactgtgcaaagaaaccattcgttaactgatctactacctttttaatgtgcccattgtggtgataataatcacttgcacgatatccaccattttgatagtaatgaagaacctcttcggctgttaaaccgaaaatgaaacagttatcatcaccgacccggtcttttatttcaacgttagcaccgtctagcgttccgagtgtaatcgcaccattcatcataaatttcatattacctgttcccgatgcttctttactcgccgttgaaatttgttcacttacatccgctgccgggaatatatcttctgctaaagaaactcgatagttttctagaaagataactttcatatattgactgacatacgggtcattatttacttttcttgcgagttcatttattaatttaataatttttttcgcgtaataatagccaggtgatgctttcgctccaaaaataaaagtacgcggataaaatgtaaaactagcatcctctttcaaacggttatacaaatataaaatatgaagaacatttaataattgtcgtttgtaagcatgtaatcttttcacttgcacatcaaaaatagaatttggatcaatggtaatccccattgtattatgaatacgctccgctaaaatctctttacgctcttgttttacctctgcaaatttctcttggaaactcgcatcatattgaactaattgtagctcttgaagcttaatcggttctttcttccactctgttccaatcgcctctgaaatgagatttgttaactgtggatttgctttcataagccagcgcctatgagcaattccattcgtcttattattaaacttatctggataaaattcataaaacaatcgcatttcccgctgctttaatatttccgtatgaattttcgctacaccgtttacgctatggctaccgacaatcgctaaatgagccattttcacaaggtcatgtgcaataatcgccattgcttcaatacgatcccactcatacggatactgttcccacagttcatgacagaaacgttcattaatctcttcaataatcatataaattctcggtaataacggtttaaaaatgtgaattggccacttttcgagcgcttctgataacgtcgtatgattcgtataagaaatcgtctgcgtcgttatgtgccaagcttcttcccatgctaacttttcttcgtctagtaaaatacgcatcagttccggaattgctaaaaccggatgtgtatcgttaatgtggatcgcaattttttcatgtagttgacgaaggtcaccatatctttctctatgcattcgaacgatattttgcaaacttgctgatacgaggaaatactgttgttttaaacgaagtatttttccctcatcatgcgtatcatctggatataaaaactccgatacagcctctgtttcacgcttatatttcaaaatatctttgcagttttgcgggaaaggaactggttcagcattccaaagtctaagtgtatttacagtactcgtctcatagccaactaccggcacatcatatggcacggccataatgacttctgcatttgtatgcctaaactctaaacgcccgtcaatttctagcggttcaacattgccgaaataacttacttctacagcttgatcatgccttcttacttcccatacgttttcatgaagaagccactgttctggaaattcgacttgataaccatcaacaattttctgatcaaacaaaccatgtttataacgaattccacagccgtgtcctggcaagtttaaagatgcaagtgaatcgagaaaacaggctgctaagcgtccaagcccaccattaccaaggcctgcatctgcttccacttcttctaactcttgtaacgaaatccctagttcagataacccttgctcgcatacatctctaatacctaaattcaagatgttacttccaagcaaacgtccaagcaaaaactcaatagacaagtaatacatttgcttttgctctccggatcgataactctcattcgttgcaatccattgactattcatatactcacgtaccatatggccgagtgtattatattgatcacgagttgtagaatctttaaaacttttaccatacatcgtctctaacttttctagaaaagttgatttaaaactttcaacatgagtaaacattttttcaccacctacatgttattccatgagacttttatacaattccttataagcaagagccgattgctcccagctataatcttcagtcatcgcttgttttacaagctgctcccataccggtttatcgtgatagaattcaattgcacgatgaatcgtatgcagcatgtcatgtgcattaaaattcgtgaaactaaaaccatttccttctccagtttcttcatcataagaatgtaccgtatcgtttaatccacctgtttctcttacaattggaatcgtaccgtatgctaatgcgataagttgtccaagtccacacggttcaaacagcgatggcattaagaataaatcacttcctgcatacacttgatgagctaattcttcattaaatccgatataaacttttaccttctccggatactcatatgccatccattcaaagaattgctcatattccgaatcacctgatcctaaaataatacattgtacatcttcttccattatttcgcggaatacagtacgtactaaatcaagacctttttgcttcgttaatctcgttaccattgaaataattggtgtatcctctttttctggcaaaccaaaataacgctgcaaggcgcgtttattttcactcttttcatataatgactctgcatcatactgagccttaatatacgaatccgtttctggattatatacgctcgtatcaataccatttacaatgccgctaagcttatcattatattttcgcagtaatccatctaacttctcaccgaaaaattcatattgaatttcttctttatatgtcgggctcaccgctgtaatttgatccgaagcgataataccgcccttcataaagttcacattcccataaaactctaactgctcactgtggaaatattcatcaccaagttctaacaagtcgtacattacttcaggaggaaatacaccttggaactgtaagttatgaattgtatataccgttttaatacgctcatataacgggttatcttgatacttttcacgaagtaagaaattaaccatagccgtatgccaatcgtggctatgaagaacatccacttcaaaatcaaggtgcggaatacactctaacaccgcttttgagaaataagaaaaacgctctccgtcatcataatgaccatacagagaatctctcttaaaataatattcattatctattaagtaatacgtaattccgtcttgctcaccttttaaaattccacaatattgatttctccacccaagcgggacgttaattactttatgtaacgtacatccatctcttaacttttgcggaatgaggctataattcggaagtataatacgaacgtccactcctaattttttcagctcttttgggagcgcacccgctacatcagctaatcctcccgatttcacaaacggtacacattctgatactgcaaataaaatattcacttgttgtcccactgcgcgaaaagtttttattactcctcttgcagcttcctcccttcgagttttcatttgaattaaaactttaatcagtggaggaaaaagcccccactgattcttttaagaataactattaatcgtactgttttgtacgcttcctttttctacaacatacggcccatcggcgtttccttttaatacgacaccgtcaccaattttcacatctttatcaataataacaccatctattatacagttatctccaatttggctcttttgcataataatactgttacgaataattgaaccttttccaattttaactgaacgagaaacaacactgttttcgacttccccttcaataatactaccgtttgcaatcattgtatttttcacgactgcaccctttaaataacgagttggtggctcatcttttactttcgtaaagatcggtgcttctttcttaaataattgcttccaaatagcaggttgcaaaatttctaagctatgtttatagtaactttcaatcgagtcaataattgctacatatccagtatgttcatatgtagcaatgtgtaatgatttcccgcgcttttctctcactacatcaaataaactgtattgttccagatctttatatgactcaaataagtctaacaataattgtttctttaacacatatgtttgaagtgaaaccccttcatggcaaacttccgtaatatcagctgccgtatgtatatgtcgctctaacaccgcttgaaaatttaatgctgttacgagatggctattcgtaataacaacgtactcttctctgcttcttagaaaataatcaatatgtcttctaaagtgtgcaaaagacccaaattcatcttggtcacattggcagtttggcgggaataaaaatagtccgtctcgttttctatctaaatcccactgttttcctgaaccaacatggtccattaacgaacgatttttatggcttgtaaaaactgccacactatgaatactagaattcaccatatttgaaagcatgaaatcaatgagtcgataacggcccccaaacggtaacgccgctagtgaacgatgccctgttactttctttaaggaaggaaaacttcccgttgcattaataattcctaacattttttctcccattcatttcatcccccttttctatttcccttcagcaattaatactacatcgtcaacattcttttctggacgaatgattgttccatcctcgataaccatttctgatccaacaatcgctctttcaatcacaacatttttaccaatcttagcccctggcataacgacagaatcaatcaccatacttccttcttccaccgtcactccttggaataacacagaatgcttcacgtccccttcaatgacgcacccttcgttaataagcgattcttctactttcgccttttcagcaatatattgaggcggttcgtttggattgacagagtaaatacgccaattacgatcgtttaaattcagtgatgtttcatcgcgaagcaaatccatattcgcttcccataagctcttcaccgttccaacatctttccaatatccttcaaacggatacgccattagcttcttcccttcatccaataaaaggggaagtacgtcttttccaaaatcgttactagattcagggtttcttgcatccatctctaaatactctttcaaaattgaccaattaaaaatatagattcccattgatgcaagattacttcttggaaattgtggtttctcttcaaactcaacaatctccatttcttcatttgtattcataatgccaaagcgactcgcttcatcccaaggtacttcaataacagaaatggatacgtccgattctttctgaatatggtaatctagcatcttactgtaatccattttataaatatggtcgcctgataaaatgagaacatactccggttcatactgacttaaatagtttaagttttgataaatggcacttgccgtacctgtataccacttaacccctgaagactccgcataaggaggtaagactgtgaccccaccgtttactcggtctaaatcccacgcatttccgattccgatataattatgaagttcgagtggttgatattgcgttaaaatcccaaccgtttcaataccagaattcgcacagttacttagcgtaaaatcaataatgcgatatttaccaccaaatggaacagctggcttggctaaattctttgttaatgcacttaaacgactaccttttccccctgctagtaacattgctacgcacttttgtttttgagccatcttgttttttgctcccctttctcgtcttcactggtcgtaatatggatacgccaaatggtggaattgtaatctctacatgtgctgcttgattatggtacggttctagaatcgtcttaagacgtttcttattcacttgtcccgaaccgccatattgctgtgcatcactgtttaaaatctcgttataatactcgaaatctggtacacctactttatagttttcatatgtagctttcgtaaaattacatacgataactaacgcatcttcttgtttatccccttggcggataaacgagaaaatactttgctcgttattattagcatcaatccactgaaaaccttcaggcgaatgatcaagctgccaaagtggttttgagcgcttatacaatgctatgagctctttaaagtaatcatgcatataacgatgcatttcaaaatcatgtaaattccaatctaaatcttcaaggtctttccactcatcaaactgcccgaattctcctcccatgaaaagtaatttctttcctgggtgagtaaagaaatatccatataataaacgaagctgagcaaacttatcccagtaatcacctggcattttatttaataacgactttttcccatgaacgacttcatcatgagaaaggggtaatatgaagttttcagagtaagcatatagtaaagagaacgtcattttctcatgaatatattttctgtactctggcgcacactccatatatttcagcacgtcattcatccagcccatattccatttgtaattgaatccaagcccaccttcatacgttggtgctgttacaagtggccaagctgttgaatcctctgccgtcataagaaaatcttcatcctctgcaaacactgcttcatttaactcccttaaaaatgacacagcgtactcattactttgctcttgtccttctttattccagtacaacatgttcgcaactgcatctactctgaaaccatcaatatggaaatatctcatccaaaataacgcatttgaaattaagaaattacgtacctctctctttcctaaatcaaaattgacagttccccatactagattttcttgtacatctttatctttatattcataggtcggtgtgccatcaaacaaatataaaccgtgagcatctttacaaaaatgccccggtacccaatctaaaatgacaccgattccatatttatgacattcgtcgacaaaatacattaaatcatgcggtgtaccaaatctactcgtcgctgcataatatcccgttccttgatatccccaagaacgatcatatggatgctcaacaagcggcataatttcaatatgtgtaaattgatgttccaccacatacggaatgagttcttctgccatttccctgtaagaatatagtgttccatcttctttctttttccaagaaccaaaatgtaattcataaactgtcatcgcttctttataaatcggttttttctttttcttacgattccagtttttatcattccattcatatccttttatatcaaaaactacagatgccgtattcggtcttacttctgcatatatagcatacggatctgcctttaaaatgacgtcaccagccaacgtttcaatcgcatatttatatatttctccttcttcaatatgcggtataaataaggaccaaatcccttcttctgtcacttgtagcatcttatgttgctcataatcccactcattaaaatctccaacaacactcattgctttcgcatgaggagcccagactgtaaatcgtaccccttgaatctcatcttccgtcacaacatgtgcgccaaagatgttataactttcatagtacttttctgtatgaaactcatctcgtttcacttcttcacaatttattacactcaatatgttcacctcacttagatgacagaattttttatactttaactatttctgcgaaaaactgcaatatccttgttaatttataaaaaacattcgtttttttcttaaaaatgttagtttttcttcacatttccgtgtaaaatatcgaattttgacgaatattcattgaaaacgctttattattcttctatatttttaccaattattttttctcaacctttattttattatgtttatcctatttttcatgctattttccactcaaaatcaaaacaaaataatctgtcataaaaaaatgtttctcaatattttttgtcacaatgttattgaaatgcgaaatttaatcctgcttttgaaaagctactttccgaaaaaggagtaactgcaaaagtaaatgaaccgaaattagaggcaggttctgttacagttggcggcgctatcgatgacaaaaactttgctggattagatggtgatttcccgttcattgatgtaactttcaaagtagaaaatgatgaattttatgaagcaaacgctcaattagagtcaccaatttttgtttactggaaacaaggtgaatcagaaccaaatagaatgcgtgtacttcaagatcaaacattctcagttatgtccttaaactcactagtagaaggaaatattaaacctggtgcgttcttaaatgaacgcgaatatttagatgaaaagttcgattatacaaagcttggcgtaaaagtatatgcgactgattcttaccgtcataagtttgaaggctcactagataaatacggatacttcaaactaaatggacttccagttaataaacgcgactataacttatatgtagaggtgacaggacatttaacaaaccgcctaacaacgaaacttggtactgaaaaagacggtaagctgcttggccaatattattatgcaagacctgacgaaaaccttgccggcgatgtaaatgctgataaagtaatcgatattaaagatgctgaaattatcgctagcaactatggtaaaaaaggactaactgtaaaagacggagaccttaataaagatggtattgtcgacgaaaaagatattcgcttcgttgaaaggaacttcttgaaaaaaggtccagatgcatctaaatcacaaacacctgtagaaaaatccaaaagcggtacactggcagatattttaaagaaattaggattaacacctaaaaaataataaaatgaaactttaatcagtgggtttttactgcccggcaaatagcggaataataaagagcactctacgtaaaatagagtgctcttttctataaacgacccttatccagcaaaaggggtatattggggatatacaagggaaaccggaaaaggaatttatattaaattatataagttcagaggtaagaagcagtttcccacctctgaattatttagcaattattatagtactggtgccattgtttcttttaatacttttacagaatgagcgaacttcactttttcctcttcatttagctcaagttctacgatttcacgtacaccttcgcggttaattacagctggaacacctacgtaagcatctttctcgccgtattgaccttcaaggtatgcagatacagttaatacgctgttctcgttgtttaagattgctttagttacacgaagtagtgacataccgattccgtagtaagttgcacctttacgctcgatgatatggtaagctgcatcacgtacgttttcgaagattttgtctaagtcttcttgtttgtactgttcgttgttagctaagattgtttctaatttttgtacaccgatagtagcgtggctccatactggaagttcagtgtcaccgtgttcaccaacgatgtaagcatgaacgttacgtggatctacatctaagtagtcacctaacatgtaacggaaacgagcagagtctaaagtagtaccagaaccgattacgcgctctttcggtaaaccagattctttccaagttacgtaagttaaaatatcaactggattagttgcgattaagaagattccatcgaatccgctatccataatgacgcgaacgatttgtttaaagatctttgtatttttctcaactaagtctaaacgagtttcacctggcttttgtggtaacccagcagtgataacaactaaatctgcatctttacaatctgcatagctaccgctccaaacttttgttggtgatggagagaatggtaccgcatggcttaagtccattgcttccccttctgcttttgcttcattaacatctactaatacgaattcttcagctacaccttggttaatcattgagtaagcgtaactacaacctacagctcctgttcctactaatactacacgattgataccttttttcatggtaatttcccctctctattgttcacatatatttttttatgattgtttaagtaattaattaaaatactaatttaatgttgtttaacttctttacattcatattgtagcacgtattattgtgaattacttcacaaattatgacctatttgtgaactttttcacatagagtgtaaagttattggaataggtgtggaatccatttcaatggaggcgttttctttagattgtgaaagggtttttcttgtggttttcatcggtaagtgaaattatatcggcgatttttagaatatatcgaccgtaactccaaatatatcagcgattattaaaatttatcgatcgtaactcaaattatatcagcgatttttgcaatatatcgatttaccgacaaaactcgacaatactgacaacataaaaaagctgtcttcagtagatcacacctgttgagagaaagcagcttcttctatatattatttattttcatccgtttctccaagtgtaggaggctacagccatacagctggggtaaaagttcaacttgaggtatcattttagatagataattccttcatatccatacaggtccaaataaataacatgattgtatttaccgctctatatacccaactgcaacagcccatacttcatatttcttctatgcataaaaaagcagactatccaaagttcacttttatacaacaaaaaagagatagcagattatgctatctcttttagtatgacccgtacgggattcgaacccgtgttaccgccgtgaaagggcggtgtcttaaccctttgataactaaaaattcttttgtttttcagttgacatactaccgcaggtcttttcattttgatttgttttaagtatatatctttttgattatacgaaacaatctgattacttatcaagtttattttatcgttttttaacaaaatggtgtcaatgaaaaaaagaagaaaaatatttgaattttttgtgacgaacttgtaggtttttgtatgattttgtaggttcgcttataagatgtgtgagtagcttttataaattcaaattgaaagcgttcgcatgaaggggatgaacataaatgaaaaaattcggattggcaacacaaatttttgtcgcgcttgttttagggattgtagtaggggcagtcttttatggcaataaaacggcgatttcttatatcacaccaattggggatatatttattcacttaattaagatgattgtagtaccaattgttatttcagcattaattgttgcagtagctggtgtaggagatatgaagaagcttgggaaactgggtggtaagacaattctttatttcgaaattattacgacgattgctattttaatgggattacttgcagcgaatatattccaaccaggtactggtgttgatatgagtaatttacagcaaagtgatatttcttcttataaacaaactgcagatgcaacagagaagaaaggttttgctgagacaattgttcacattgtaccgaaaaacgtatttgaatcgattgcacaaggtgacctattaccgattatattcttctcagtattattcggcttaggagttgcggcaattggggaaaaaggaaagcctgtctttaacttttttgaaggcgtactcgaagccatgttttgggttacaaatcaagttatgaaatttgcaccatttggtgtattcgcattaattgccgttacggttgcaaaatttggtgtagcaacactacttccgctaggaaaactagtgctagctgtatacgtaactgttatactattcgttgtgattgtattaggtattaatgcacgaatggttggagtaaacatttttacattaataaaaattttaaaagaagaattgattctttcatttacgacagcaagttcagaagctgttttacctaatataatgagaaaaatggaagagttcggttgtccaaaggcagttgcctctttcgtaattccgacaggttatacatttaacttgactggatcggctatttatcaagcgttagcggcattgtttgttgcacaaatgtacggtgtgcacatgtcactaacggagcaaataacgttattattcgttctcatgttaacatccaaaggtatggcgggagttccaggtgcatcgttcgttgttgtattagcaacgttaggttcaatggggttaccactagaaggtatcgcattaattgcgggaattgaccgcattttagatatgattcgctcatctgtcaatgtattaggaaatgcattagcggccattgttatgtcgaagtgggaaggcgaattcgataatgagaaagcaaaacaatatgtagaaacagtcaaagaaacaaaagcagcataagaaatcgttaaggagtgaataatcatggcaacattaactgaagttaaaaatggtgttcgaattgaaaaagattttttaggtgaaaaagaagtaccaaactatgcatactacggcgtacaaacaatgcgtgcagttgaaaacttcccaattacaggatacaaaatccatgaaggtttaattaaagcgttcgcaattgtaaaaaaagctgcagcgcttgcgaatacagatgtaggaagattggaattaaacaagggcggtgcgatcgcagaagctgctcaagaaattcttgatggaaaatggcatgatcatttcatcgtagatccaatccaaggcggagcgggtacttcaatgaacatgaatgcaaatgaagtcattgccaatcgtgctcttgaattattaggaatggaaaagggagactatcattatattagtccaaatagtcatgtaaatatggcccaatcaacaaatgatgcattcccaacggcgattcatatcgcaacgttaaatgcattagaaggcttattacaaacgatgggttatatgcatgatgtatttgaattaaaagccgaacagttcgatcatgtgattaaaatgggacgtacacatttacaagacgctgtgccaattcgccttggacaagaatttaaagcgtactcacgtgtacttgaacgtgatatgaaacgcattcagcaatcacgtcaacacttatatgaagtgaacatgggagcaactgcagttggtacaggcttaaatgcagatccagaatatattgaagcagttgtaaaacatttagctgcaattagtgaattaccgcttgttggtgcagaagatttagtagatgcgacgcaaaatacggatgcttatactgaagtatctgcagcgcttaaagtatgtatgatgaatatgtctaaaattgcgaatgaccttcgcttaatggcatcaggtccgcgtgttggtttagcggaaattatgttaccagctcgtcaaccaggttcatctattatgccagggaaagtaaaccctgttatgccagaagtaattaatcaaattgcgttccaagtaattggtaatgaccatacaatttgccttgcttcagaagcaggacaattagaattaaacgtgatggaaccagtacttgttttcaacttacttcaatcgattagcattatgaataacggtttccgtgcctttacagataattgcttaaaaggaattgaagcgaatgaagatcgcttaaaagagtatgttgagaaaagtgtaggaattattacagccgtgaaccctcatatcggttatgaagcagcagctcgcgttgcgaaagaagcaattgcaacaggccaatccgttcgagaactttgtgtgaaaaatggtgtattgtcacaagaagacttagagttaattctagatccattcgaaatgacacacccagggattgcaggagcaactcttttaaagaaaaattaaaagaagaggggggacaatcccctcttttttgtttacaatatagaaatgctatatatgaatagaggtagggatgttatgagcaagtttacagtagcttctaatggcgcattagaaacaacattaagaggagcagaagtattatcaacaccacttttaaataaaggggtagctttcacacaaaatgaaagagaagagttaggtttaaaagggttattaccgccagcggttttaacgttagaagaacaggcacgccgagcatacgaacaatttagttctcagccggatgatttattaaagaatgtatacttaactgcgttacatgatcgaaatgaagtattattttatcgtatattaacagatcatttacgtgaaatgttaccgattgtatatacaccaactgtcggtgtagcaattcaaagatatagtcatgaatatcgtaaaccacgtggtgtttatttatcaattaacgatccatcaggtatcgaagaagcattcacgaatatcggtgcaacagctgagaacattgatttagtcgttgtaacagatggagaaggcatattaggaattggtgactggggcgttggtggtattaacatcgcaatcggaaaattagctgtttacactgctgcagttggaatcgatcctagtcgtgtattaccggtaattttagatgtaggtacaaaccgtgaggagctattaaacaatccattttatattggaaatcgtcaccctcgtataacaggtaaagcttacgatgaatttattgatacgtttgtacaagcggtaaacaaacaattcccgaaagcacttttacattgggaagactttagctctcgtaacgcacgaaaaattttagataaatatcgtcatgatgtttgtacgtttaatgatgatattcaaggtacaggtgcagtttcacttgcggcagtattatcggcagtgaaagcttctggtgtaccgctaagtgaacaccgcgttgttgtatttggtgctggtacggctggaatcggtatcgcagatcaagttagagatgcgatggtccgcgtaggcgtatctgaagaagaatcatataagcgtttctggtgtattgatcgtaacgggttagttacagataatatggaagatcttcttgatttccaaattccgtacgcaagaaaagaagtagaagtaagtgggtggaagcaaaatgatgtgatcggacttgctgaagttgtgaaacatgtaaaaccgacaattttaattggtacatctactgttgcaggtgcatttaaagaagagattattaaagaaatggcttctcacgtagaaagaccaattattttaccaatgtcgaatccgacaccacttgctgaagcaaaaccagcagatttaatcgagtggacagaaggaagagcgttagttgcaacaggaagtccatttgaaccagttacatataacggtgtaacgtatgtgattggacaatcaaataatgcactgattttcccaggtcttggtcttggaacaattgtagtacgagcaagcgtcatgacggatggaatgttcgcagcagcagctgaagcagttgcaagtatggtagatacaagtcagccaggagcacctattttaccagaggtcgaagaattacgtaatatctcagaaatggttgcaattgaagtagctaaagttgcagttgcagaaggtgttgcaagagtgaacttaagtgataacgatatcaagatggcagtgaaagaagcaatgtggaagccagagtatcgccaaataaaagcggtagaaaaggttagaatatagaaaaaaagcccgtttataacaataagcgggctttcgcttttactactgaaaaaaagtataggaagtgtcacctttgaattggaatcaattatggaagaaagatatgtcccttttaattatattaatggtcgttgttccgattgctggggagctgaactttcatccctttaatgatacgtttcgagttagcttcggtacaccgctattcttctttttattattatttttaagaagagtaccagcaggagttgcaggtattcttgttggtatatctgtagtcttattccgagtatgtcttgactggatcatgcaaggttcatttcatatgacagaatcattttatttgcgttatcctgtgttcttctattattttatttatggcagttttttttcgctttgcagggtaaataagttccatcagaaaccaatcattattggatgccttgggatttcaattgaaattgttgcaagtatgtcagaacttgcgttttatcacatgttagtactaggtacaacaataacgatttctgaagtaaataaactcatcattattgctatttttcgtagtttctttgcacttggttttttaaatatgatgaatttatatgaaacgaaattaaaagaatcgcaagttcgaaaagaaaatgaaaatatgttaatgcatctttctaatttatatgtggaatctgttcatttgaaaaagacgttacaaaatgcggagttaattacacaagaagcatatcaactatatcgaaatttacaagtaagcgctgattcaagtagtaaaacagcattgaaaatagcgggggaagtgcatgaaataaaaaaggataatcaaaggatatttgcaggattatctaaactgttattagataaaaatgtggctgaatatgtagaaggacatgagttagcagaaatgattgttagaataaacgagaagtatgctgaaatgctagaaaaggatatacgtttttctaaacatatagaaggtgagcatgctgcataccacgtgtatacagttctatcaatttttaataacctcgctgcaaatgcagttgaagcaattgaagataaaggtgtcattattattaagctatataaaagagatcaacatatattttttgaagtaattgacgatggacctggtattgcacaaaaatataagaaattagtatttaagccaggatttacttctaagtatgatcaaacgggaacaccgtcaactggtattgggctttcttacataaatgaaatggtaacagagctaggcggagaagtgagattagaaggccgagaaaataaaagaggatgtaagtttatcgtttgtttaccggagggtagtttaaagcgggaaggggaatagatttgttttattatatcgtagacgatgatgaagttttccgttcgatgctttcgcaaattattgaagatggagatcttggagaagtaattggtgaggcggatgacggagcttttattgaggcggatcaactaaattttaaaaaagtagatattttatttattgatttgttgatgccgatgagggacggaattgaaacagttcgtcacattgcgtcaactttcacggggaaaatcattatgatttctcaagtggaatcgaagcagcttataggtgaggcatatacacttggtgtagaatattatattacaaaaccattaaataaaatcgaagttgtatctgttgtacgcaaagtgatggagcgtattagattggagcgttctatacacgatattcaaaaatcattgaataacgtgtttcagtgggaaaaaccgcaattgcgtactgaaccagtgcaagaaggaaaaaagataggggatttagggcgctttttactatcagaactcggtattgcgggagagaatggaagtaaagatttacttagtatgctggaatatttatatggtcaagaaaaggcacagacatttgagtttggctttcctgcgttaaaagaaattttccatcatattacgataagaaaattaggggatttagctttagaggcggatattgataaagagaaaaaagcgtctgaacaaagagtacgtcgagctatttatcagtcgttaaatcatttggcttctttaggattaacagacttttcaaatccaaaatttgaaagctatgctccaaaatttttcgattttaccgtagttagaaaacggatgacagaaatgacgaaagatgaactcgcatcttctggtcatacgcgaattaatacgaaaaagtttattcaagtgttgtattttgaggcgaagaggttgatggagatagagtgaagaagatgcttataaataagcatcttcttttgttaaatcaacattttatattttctcgtggagcatgtaaaatgttaagtaagagaaaatggttttatattaaggaagtgtcaaagcaatgagtttcacattgaataaatcgattattaaagaagtgtgcggagagacctcatataaaagaggtgaagcctattataaatcaaataaagtgataatagatcagtacgatgaaaataaagaaatttgtgaggcgacagtaaaagggaacgaggatttccatgttacagtagcaaaagccaaaaagggtgatgttgttgcaaaatgtagttgtccttcattagcgtcttttcaaacgtactgtcaacatgttgcagcagtattaatacaaataaactataatcaacaaacaggtagaatgagctccactagtaacagaaatgatcaattgacaagtggtatgtttcagctgtttgcagacaaaccactgaggccaaaaagtaaacaacaccgttttgatacacgtgaaatattagatattgagtttatatgtacaccagtagctacgagaagtggtggggctcttcttggaattcaattgaaacttgccaaagtgtatttcataaatcatattagagaatttctttctaaggtggagaaaagggaatcttttcattgttcaaatgaatttacatatacaccagatgtacatagttttaaacaagaaacggatgcaattattcagcagctcattaaaatgtatcataatgaaaaaatgtatgaagatacgctagaagtacatgcgaaacaagatgaaagtatgatatttataccgccagcttcgtggaaggatatgctctcttcactttctaaagttgaatatgtacagctgaaacaaaatgaacaactgtttcagggattacaagtttcaaaaggtttgttgccgttacactttgaatttacgaagggaaataatggcggatttacacttcatatagatggtctaaatcgtgtacaagttatggatatgtataacaatgcactttacgatgggaaattatatcacttacacattgaagattgtatgcgacttattgaattacaaaagatgatgagtcgctcaaatagtaatcagttttatattccagaaagtaagatggaacatttcgtcgcgaaagttgtaccaggattaatgaagctcggaactgtacacattgatgaagtaatatcggatcgtgttgaaacaccttcgctaaaagcgaaattgtatttagaccgcgtgaaaagtcgcttattagcaggtcttgaatttcactatgggaacgtcatgattaatccgctagaagaggatggacagccgtctgtttttaatcgtgatgagaaaaaggaaaaagagattttagacattatgagtgaaagtgcctttgcaaaaacagaaggcggttactttatgcataatgaagaagctgagtataactttttatatcacgtcgtgccaacattaaaaggtttagttgatatttatgcgacgacagcaatcaaattgcgaattaataaaggggatgcagttcctcttattacagtgagaagaaaagaaagaattgattggttgtcatttcgttttgatataaaaggaataccagaagcagaaattaaaggtgtattagcggcccttgaagagaaacgtaaatattatcgattggcgaacggttcgtttttatcgctagagagtaaagagtttaatgaaattaatcagtttataaaagaatcaggtattcggaaagaatttttacatggagaagaggtaaatgttccacttattcggagtgtaaaatggatgaacggacttcatgaaggcaatgttttaagtttagatgattctgttcaagagttagtagaaaacattcaaaacccgaaaaaattaaagtttgctgtgccaaatactttaaatgcagaaatgagaaagtatcaagtatatgggttcgaatggatgaaaacacttgctcattaccgttttggcggtattttagcagatgatatgggacttggaaaaacgttgcaaagcattgcttttatagattctgttttgcctgagattcgagaaaagaaactacctatattagtcgtttcaccatcatctcttgtttataattggtttagtgaattgaaaaaattcgccccgcatattagagcagttattgcagatggaaaccaagcagagcgccggaaaattttgaaagatataacggaatttgatgtcgtaattacgtcatatccattactgagaagagatataagattgtatgcaagaccatttcatacactattccttgatgaagcgcaggcgtttaaaaaccctacaacgcaaacggcaagagctgtgaaaacaattcaagctgaataccgttttgggctaacgggtacacctgtagaaaattcattagaagagctatggtctatcttccatgtcgtcttcccagaattattaccaggaagaaaagagttcggtgatttaaggcgtgaagatatagcgaagcgagtgaaaccattcgtattaagacgattaaaaggggacgtattaaatgagttgccagagaaaatagagcacttacaatcatcggagttattacccgatcaaaagagtctctatgctgcttatttagcgaagctcagggaagaaacgttaaagcatttagacaaagatacgttacgtaaaaataaaattagaattttagctggtttaacgagattgcgacaaatttgttgtcatcctgctttatttgttgatgattacaaaggaagttcagctaaatttgaacaactgttagagattttagaggaatgtagaagtacaggaaagagaatattaattttttctcaatttacgaagatgctttccattattggtcgtgagttaaatcaccaagcaattccatacttttatttagacgggagtacaccagcgcaggaacgtgtagagctgtgcgatcggtttaatgaaggagaaggggatctatttctcatttctttaaaagctggtggtaccggacttaatttaactggtgcagatacagtaatattatacgatttatggtggaatccagctgttgaacaacaagcggccgatagagcgtatcgaatggggcaaaaaaatacagtgcaagttataaagctagtagcccacggaacaattgaggagaaaatgcatgaactgcaagaaagtaagaaaaatttaattgctgaagtgattgagccgggagaagaaaaattagcatccatcacggaggaagaaatacgagatattttaatgatttaatatgaaaaagctatgctttcacatgtgaaagcatagctttttgttgtaataattatattttgttttgtgcaaagtaaagaaatcaaatgttatttaaattacttctttgtacctttacttttgtatggctttgcagctgcctttttctttgcacttgattgccaacggttccatcctttacttcctgtaccttgtcctacaccttttttcggttttgccttcgttttactcatatgatcactccgttatttaaaaatcttatttgataatagtcaatgatttagaaaatactctttataaatgactatgattgctttaagtaaaaataaactgcttgaatgctatagtatatcatgaaattgcaagtaaactgaaaggaattataaagaaaatgaaaataataagaaatactgcggattctatattccgaacgatcacattaattattgtgtatacgttagtttcggtcagtgaaacattttttggattgacgaggcagaaaaagtaaagatgttaaattaacaacaatcaataaagccgtaaaataaagaattgaaaaatattttaaaactttttgttgactttctttattttttgtatagaataatcattaataaaatgtttcagagatgtgacaacaaaacgactatgaaaggacgagtagtagtaggacgtagtttaagcgagtcaggggtggtgtgagcctgatacgaagcctattatgaagaacctcctggagttgctaaccgaaatcctttataggaaagtagacttagccgggaacttcgccgttacaagaagaacagtatcgagatatttcatctccgtattgtataagtgagcaacctctgttgctaatttgggtggtaccgcggaaccaaagcctttcgtcccagttttttgggaaagaagggctttttttgttggcttcttttcacaacatccaaacattttaggaggaaaccaccatgtatcaatcattaatgacagtaagagagactcaaattgcaattaaggaagttaaaacatttttcgaggaccaattagcaaaacgccttgaactattccgcgtatctgcaccattattcgtaacgaaaaaatcaggattaaacgatcacctaaacggtgtagaacgtccaattgaatttgatatgttacattcaggagaagaattagaaattgttcattcactagcgaaatggaaacgatttgcattacatgaatatggatatgaagctggtgaaggtttatatacaaacatgaacgcgattcgtcgtgatgaagaacttgatgcaacgcattccatttacgttgaccaatgggattgggaaaaaatcgttcaaaaagaatggcgtactgtcgattacttacaaaaaacagtacaaacaatttatggaatattcaaagatttagaagatcacttatttgaaaaatatccgttccttggaaagtatttaccggaagaaattgttttcgttacttctcaagaattagaagataaatatccagaattaacaccgaaagatcgtgaacatgcaattgcgaaagaacacggtgcagtcttcattatcggaattggtgatgcacttcgttcaggtgaaaagcacgacggacgcgcagctgattatgacgattggaaattaaacggtgacattttattctggcacccagtactacaatcttcatttgaattatcatcaatgggaattcgtgttgatagtaaatcacttgatgagcagttaacgaaaactggtgaagacttcaaacgtgagtatgatttccataaaggtatactagaagacgtactaccattaacaatcggcggtggtattggacaatcaagaatgtgcatgtacttcttacgtaaagctcatatcggtgaagttcaatcttctgtatggcctgacgatttacgtgcagcttgtaaaaaagaaaacattcatctgttttaatagaagtgagagagggtagtggtcatctccctgtcaagtagacagaaataaaaagagtattatgccacggccttttcccgatattctatcggggaaaggcctaaaaacgtggtacttcaacgttcacagctatttattcatttattcccactcaatttacaaaaagtatcacataagaacacacactgataaataaacacttttaaaacgtataaaacgcttatttccatctaaaacactcaaataaaaataaacaagtaccatatgagtaccacacaacatataaacaaaagagcacagcgtgtatatacagtgcgatcaacactctatataccgtccgcctactcacgataggcaaacacctgctgtaccctcacgcactattttacagtacgtaagggctcctagcaacagtttgcttacatttggcattctgttgcttttttgtttccaaaaaggagacaagatttataatgaaaacgaaacgtatagacgtaatagcaaaagaagaatcctatcacaatttatccgtatttattgatgtggaagaactaaacaaagtcgttagaacatacaaagacgtcattagaacgtctgttaaacgtgccgatgtacaagctagacttattacattattggatattttaaagcgtcacagttgtaaatatgtaggcgttagtttcctatgcaaaaattcaattgctgacatgatggaagtatcctataaaactgtacaacgtttaatgaagaaacttgtggagttaggcatgattaatcaaatagcaatgaagcgtaaaaaagatatgcgccaaacttctaatgctattattattcagccaattgtggaggaagtgtccaacaaggtagatacaaaaagtcctacaaagtgtcctaccattaaaacaaaacctatttctttaaaacaaaagattaaagatataaatatacgtaagagtaacgagtctcaatctaatgtcaatgataatgattttatcgattatcgagttccacaatctatgcgaatgaaattagcaactgcatttgattcaaaagttatcaatgaatccttccacaatgctgtgaatatcgttaaaaaggctgctaagaaatttaatttactatcagacaaagatgtatttaacaacattattgccaatgcttctgttgctttattctctaaaactcatgaagctgagcataacgggactcttatgaaaaatcctattggatactttactaatacatttaaaactatggtatatgactacatcgatagatttagagacatccacaatatttctaaacgtaaagaaaataaccatgttggactaacaggtatgttcaaacagtttatcgatgggtaaattcgcttatttcaacgggattgtaaataacttaatggataagttttactttgatggggattttatgaccaaataaaaaaacacccagttctaataactaggtgtcccaacttttaaaatgtccataaattgtattttattttacaattctctttatatatccttattcagattcttttaaagtgatgggctcattttcttttataagctcctcttccacaataatagattcttcttttggagaatagtattcataaatttcatttcgaacagaattacgtatattttcattttctttcaggaattgcttagcattatctctaccttgcccaagacgctcctctttatacgaataccatgatccgcttttctgaacaatatctaaccctaccccaatatcaacaagctctccctctagggaaatgccttctccatacataatatcaaattctaaatttcgaaatggtggagcaactttattttttactactttcacttttgttttattaccaacaatgtcactgccttgctttaactgctccgaacgacgtacttcgagacggacagttgaataaaacttcaacgctctaccaccaggtgtcgtctcgggattcccaaatgaaacgcccactttctctctaagttgattcaaaaatatagctattactccatttttagatactgctcctgatatcttcctcaaggcttgccccatcagccttgcttgcagtccaacatgtgatgctcccatatcaccatcaatttctgcctgtggtactagagctgctacagagtctactacaataatttcaacagcgctacttcttactaacgcttccgctatctctaacgcctcttctcccgtattcggttgtgacacaaacaactcatcaatatttacacctaacttttctgcatatacaggatcaagcgcatgttccgcatcaataaatgccgcagttccaccttgtttttgaacttctgcaattgcatgtaatgctagtgttgtctttcctgaagattcgggaccaaagatttcagtaatgcgccctttcggatatccaccaacacctaaagcattatctaatccaacagagccacttgacacaacagatattttttgttcaggtcgctcacccagtttcataacagcacctttgccaaaatctttttcaattttcttcagagcctcttctaatgctttctcttttcctttagttgtattttcagttgctgccatatgaattgctcctttcaagaacattcgtttgtataaattatagaacaatcgttctgttccgtcaataaattagaaacgaacatttacagttgttgcatgaaattggtatgatttacttaatttaagggggatgattatatgaaggttgtccaattaatatttagaggatttcgtttaatcggtagaattattaatccaatactaaaggcattatctaaaagtaaattttaaatatcatagcaataaaaaaaacgcccatttttgcactgcaccaacttgttagacgcaattaacacaatagtgcaaccaaaatgaaaaaaatagttatgaaaggaaaacagatgtgtaaactcaaagaatatgacctggcatatatttgttactattctgagagaatagagttttcagccattgctgctggattttcacaaccggtgtcaactaaggtaatacatcatattgttcaagaattaaataatcagggactatttgatttttacaagagtacctatgaggaaatgttagaagaatgaggagagtggctacatatgttaacgaaatcgcaatacgaacgtttcgcagcagataagcaatgtatcgaacgtgcattaaccatgtggaaagaatggatgtgcaaaaaaaagacttatacagatgaacttgctgctcaaggtacgatgtacgttgtcaatcatatgaaattacgagatcatcaagtttctgtaatcttcgatttttttgatgagtatttaactttattagatcacggagaagaacaagcagaagctttttataaaaccattatgaggatgtaataacagagggttctctcacgaataactaaaaaagagtatattcataaaaaataaaggtggttaatacaatgaaaactacgaattgtgggggaatatcttagtaatacttgccctactctatgcgctgttatatactcttattgagaacacacttctgtagttcccttttggtgtcttacaagaattgtagttttgtcatctttcttttggattgaaacacaggaaaagatacttcataatgaggtgttttttctttttccaataggttgttaaaaaccacatctctttaccatactaacaatacagttgctatactgctatctatacaactttcgaggtgatacagcacgaaaaaatatcaaatcgtttatagtgttttctctcccagtgggcaacaatacaaagaaaagtttattgaaatttacgcaccaacagttgagcatgcaaaacacggaatagaaactgaattaaaaagaagaatgggcgacctataccaatggcaaatagacgttcaacaaatagaaggtgaacaactctcgttattctaaacaacttgacgagataaaaaagaagatgtaaaatgattatccgtgtaaaaaacttggtttatacaacccaacacgttgtgacagatcgggctattgccaacaacttttatgacattcttagttgtgtttagcaagatacacgggagaggtttacagattcgtaataatgaagcaagtagggcttataacttattatggtataaaatatatgtaaactgcatactctagaattgacatctaaagaacttacaacatgaaaaagacatcttcgactggggaaggtgtctttcttacctttagtcaagtgctattgaaagatttgattcgatgaagtaatttattttttagagtgatgggtatctttcctctaaaaaataaatttgtgtacaccaaatagacctaacgagatatcatttttttcgcgaggtcaattgtgctatagtatatttagttgattacgaaccggttgatgctatttcgtaatcatatagtttttcgtgtgtaataagatgaaatgccactttcaaaaacttattcatacacgcaacggatgcaactttatgaggctttctcaaaggttgcttctttaatttgtcatagtattctaccagatgattctttgttttcttacgtaatgtaatcatcgatgtaaccataaagaataagattttccttagtttattgtttccccttttattgattttgtccttataatgagtattccctgactgataacgcctaatatcaatccccacataggcatttaattgcttattatttttaaaacgtcttatatcacctaactcaccgatgattcgaacggctgttatttcccctattcctggaaatgaccgaagcacatgatattctgtacgttcattagaaagttccaccatctgctttacaagctgtgccttcttctctttcaagtctgcaatgcggctggcataatctttgacttgctcgcagcgtacatcgtttcttgagattgctgggtaagagatttttgcagctttaaggagggcggttcctttctcttctactcgtttcaaagacaaccgtttttgtgtatttgcctttaacctactgcaaattctcgttttagaatgggctaacacttcatccgggtgtggatatagttgtacgatattcaaaaacagggacgaccgctttgtaaatagctgttccaactctggaaaactcaattgtaggattgcgtgtaaccgagaatataaatgagtaatctcaatgtctaactcatcatagtaacgtgtgagtccacgcatctgttggtagtatcccttttcttgatacgtttgttcacgtcctactcgaaagtgcgattttgccagttcatgcgcgtcgcttttatctgttttttggcggcgcattgaagccgtttgtaagtttgcttcaagaggattaatacgacaatatgcataattattatcttgaaagaatcgttccaacggtttggaatatacacctgttgcttcaaaaacaatttcaggttcttctccacctcgacctatcagttcctgaagcgtttcatgaagctgttcaaaagagggacggttatggttaatttccttctctacttcacattgacggtatcgattgtaaataaccatcatacttttacccatactgacatcaaaagctacaacgtgttgcatgacatgaatctctccttttttgccaatcatagaagcctccacagtgccttatcgattccactttcttatacacgatctcctggatccaacatactaaactgattcaaataagggtgtgaagtcgatctgtttatttatacggactccaatatggtccaagacacctttcgaccttacttcacttctactaaaaaaaatagtagcacaaaccgtggccttggtttgtactactaatgttagtatgttttgcatattacacggtgtacctacatataatgaaatcgacagtgattttttctccttttatgataaatctattgaaaaaagcattcttggggacgaatgctttttttctattccctatttcacatacacataggctccaatcataaaccctatattaaaagtaaattttaattacatataaaattaacacgttcctcttttataataaaactattcttttgtatagtaatgtgttttacttttcaaactttacatattcacctgaaacccattgatcaccaccaacattataccaaccgtccctatatccccaagactgatatctttcgctttggtgtacgttttttacgacgccataattagttcctgggccagtacgaacgcgtaatacatctgctgtaatagtaactacccctaaaccatcatttgaaggttgcgaagttgtggatgattgtccatccgcttcgaaatgtaaccactctgagttttcgtaaacccactgatcgccacctaaattaagccatccgccagaacgtccccacactttataattttcaggtgcatttagtttcctaattgaatcatattgagtccctggtcctttacgtaagttcacgttttgaccagtaatataaacaatacctgtaccacttgtaattggtggttgtggaatctgtggcgtttctggaatttgaatttccccaccagaaactaattgttgtttaaaccactgtacacgcccttcattaatcattctatgaggacaatatttaccgtttctttcttggtgtgttttaactttagaaattggaatgttgaacatatccattaactgacgaattacttgagcggcattcaattcagctttacgatatctttccccacctgacatagaataacaaatctctataccgatactattacgattacctggtccattcccatcacctgcatgccaagcatttctattaaacggaattaattgaatagcttctttgtcatctacagcgatatggaacgaagtacctgtactattgttagcgacattattacgttcgtttaatgccgtagcatcattatacgtgttgtggaatgtaatttccgttggattcattggatatggacataaaactgaataacgactttctggtactaacatttttttgatttccattactgaacatctccttttttctcttcctgtttttgtttaccgcccaaaatttcaactgcatttgttaatgctgaaggtaaggggattcccatacgaccagcgttttctaaaagtgaaagcaactcattgcccatgaagaagaaaatagtcgcttcacgaattgcactgttacttcccagtgctgaatctagttgagcggacgctccgaccaaaagaaaaagcaccacctttttggcgatgcctttgaaaccaactttactttttaattctccgttataccctgctgcaatcatgccagttaaataatcaataactgccatcgttactaagattttcaatgttgcatcccatcctcccaaaaaatacccacaaaagcctccaaatgtagctataaatgctttcattaatatatcaatacgatccatctttccatctccttatttataataaaaaagagagacgcttgtccctctctcaataagtacttttattttaagatattaaatcatcccttttaatattaaacccaagactgacatagtaattgcactaataataattcgtaaaatccaagttgtattaatgctaatcttttctaattgcttattaattgtagcaatgtctttctcattaattgttgtgcgagtttctaaattacgaatatctcgcataatttctttttgttctgcttttaaactgtcgatttttacatatacatcttccactgcattcacatccttttaaaatcttaataaaacaatctctacatgatatgagacaaccttatttatggtgaatgcatcgcagaaatttcaaaacaaaagccgtattttgtgcaaaataaaaacagcttatggctgccctatttgcgttgtattttcaattgttaatgtctcttgtggcggatattcacctgtaagtttaaaataatcatttgcacaaatgttccttttagcaactcctaagttcaattcatataatttggctccacaaccacataactcacatttcgttaaaaccctaaaaccaatagttccgtcagacatttccctccacacctcaactttactcgtatcattggaaacccctgcattatctaacatgtcagcaggtacttgtataaagactcctgtttccgttcgttttacgtctactattcttcccatataaggaagcgtttcaccttcttgaaaaggcatcatatagttaatatccatgtttaatccttcctttctatccaagtgcgttaaatttccagccacttggagtactcacataaaaacccgctccagcattaccgtctgtaaaacgaatatgtccccattgttggaatccaccgccacctaagttaatcccctgcattgctcgtatattcctatggattttcacttctttttcagtacttatatcaaacgtttgtccgtctggtgatggagatatattattattcacaccacctacagcaagcgcgttaaacggctgaataccatctgctctttctgctgcagcacgatcccaattatacatagatgcatatttgccactgtataacgttacaccacttacacaaattgctgtcccttgtctcatgtcagcatttccagaacaaactttaataattaatgcgtgctgttgcggaatatagtttgttggcactttgaaagtgaaagagtatcttctgatttctccataaaatgtagacggttcaggaaaatccattttttgttcattccatatatcgtaacttacattgtctcggaatttaacgcagcatacttgtaaacgaggtttccctgttttacgtgcaccatttatcatagctgttctaaagtgagcagaaactgtatattcgttaccaggatgtatcccattattcacgactgtttcgggatagttatacatatctacccttgcagcatttaccatttgctcgtaatcgaatatatgtgtattcttttctattacgacatttccccatgacttccaagtaagaccatatccaccttcaaacccataataatcggtatgtccaatgtttttctttgtaacactagaaaagtcgggatctgatattaggtttcgtcttgataccgcagttgtttttgttccccattcgtcttggaataggaaatctagcattttaacagttacaccatctttatcaatagttatcttatcaccgtcaattctaataagattcgtatcaatgccttttgccgttaaccatttcaccattgtatcggcattaatagctacctttgaaacatcaatctctaatttttccgatgaaaagttaatagctgcgatgatattcccttttttaacttctgcaaggattccttcatcaagaaccttaagtttagaacccgttgcttttacataagcggcgtaagtctcatttataaacgtttcttgtttttcagaaatgattgaaacgccctctttattagtactaatacttctttctaattctgtaacttttttattgtaatcttcagtagctattctattggctatatcttctagcattttgtcagcatccgtttgatcttttggatgtagccaaaattctgtagctatagtgccacgttgtaacataggtgcagcacaccataaacgtccatttcttgtaacgtaataacgccatctcacaaacgccgcattagctggcgctttatctgtgcatacagcacgaacccatgtatgatttacaacagtgatattcgttctagctgtcttaatgcgagtttttttgtcagcagtccaccattcaatttcaataaatgcaccgccaccatcaataggtgttttcccgtcagtattgaaataacctgatgcaacaaagtcttcgttaacctgacactcaataaattgacttgtaagtccccaccaacgatcttgggactgtccagtaacagtaattgcaaatgtattcatacctttgtattttaaattcgtatcaacagcaccagtagccccattaccgctattccaaaaccaatatttcggtcctaacgtaaaattagcatcacgcaactcgttgacagtacctaaaccacctacataagcttcaacatctttctttttcattgctagcttcaattcttcagattgttgcaggatcgttgtagtagcttgagtcagtgtttccccttgctgagtttgtatttcctgtattttttttacatcacttgttatcccttcggcgttccgcgtaatctccgttactttctggctgaatacattttcttttaccccatcttccggagacggagcgtatgcttttggcatagatccttttaacacggatacatttttgaagtagcactcactaccatcagcagaacgatcaccataaatatataaactaaacccttttttcatatctgatttatcatgtaatttcattgttgtatgaactcgaacccactttttaacaggttcgatggtcaattctggcgtacctccactatgaaagcccattgtattgttaccctcaataaagtggtgtaatcctaccgctattttgttatttgctgtttccgtccatacatctaaagcgatcgtgtacgtatcacctggctggaaatcatttcgaaaactagctggcatttcttgaggcattccaagccaccttttagcttgaccgaattgaccatttttgttaataacagcaactacaggatacccaaactttttgtcatcaacgtgcatatgataaccctttgtaggatctgttgttccagcgttataacctgttgcccaattaccagcgcgcaaattaccgtttaggttcttatcccattgcagatcgttatcggcccaatagtgtgtgaaatctccgttacgtgcatagttacgatcaccagcatcattaatgatagattccgttttttcaatacgttcttttacaccctcaaaactttgctccaactcataagtcgattttgtaaaacctgtaggaacggaacctttttctagtttaggtttcttgaaacgaaatttcttaccctttgaattttcgtttctttcaaatcgtaatcgcaatccccatccagttgcccgcgcatcaatcttaaatgtaaatgatctcctagaccaattagcgacaggaaatctattgtacaagttttctgcccaaactccattaataaattggaatacaattaaatcaataagagcatcattttgcatatcgatactaaatgtcatatctttctctttttcgtagtcacccatcttagtattatctagatggaattgatagaaagagtcggtatgatctgtacattctacgatcatgtaatcctcagtgaacgattgagcagctttgttgactagtgcgcctccagacattccaattgtttgtggcttttgatttcgcccagtattgattagccagttttcaacgcccactgtacgagattcaacctgctccaattttttagagattctcccagcctcttctttgatctcggttgttatcttggtgaaaacattaccatctgcaatatcttcaggagcaggtcgccacgaataatctttactgcctatagtcaattgtggtgaactctgctgataccaacaaccagcaggagggtttgcatcaggttctatacgtaaatgactctcgttatctgttcccggtaacgacatcatacttgctgtcactgtgaacgaaacgcttaccctttgccattgattagtagatttatttggacggattccggtagcacctggtgcaaaatagaaagtgtgttgtaattcttggccatccggtaaaccttttactcgagtataaattgaataggttactttatctcctactttgacaactccccgattcaccaaatctttgaagttataagctaaagcagtccatgatgattgggtttcaacaactgcattaccttgaaaaacatctttcgaaattttaactttatcggctgatttaaaccaccaacgattgtctgcttgcgcaaagttcaaagcaccatcaaaagatttagaaccgattaataagtttcttacatcgtcattaatgtttgctacactttctttaacttgtgaaataactttcgtatttccgtccacatcactttctaaggtgttgattttatttgtagtctcactactatttttcgttaatgtttcaatagacagtttaaatttctcagaatcctgttcaacctgggttacttttttatcaatttcaccttgatctctttgtacgtcagaaatagttctcgtaactttttgaagactttctgttactgtattaaattggccagtggtttcttgttgcgcttcttccactttcttatttaattcttcttttgcgagtttaatatccttattaacctgctccagtgtatcttttttaattgattccacatcaggaataaggagttcccaacctttaccgttccacacttttaaaacaccaggtttaccgttactaatatctcgccatatcgtcttaccaattttaagacctttgataactaaaaattcttttgtttttcagttgacatactaccgcaggtcttatgttaaatgttttgttagatttttgacgctttacttactatttgttagtaatttgttttctattaaacttaatgacaaaagagttaagttggtgactcttttaccttccgaattttgtgaaatacccttttcttttaaaagtttaataattcgttgtctttccctttcaactttcaatcgtatttcatagtcaaaatacattttatttcctcctttacattttgggtctgaattttattaacctataattcaacggaattaattgtttattcaagccatactgtccagtaagcataatcatcttcatgcatttcctcatattcatcaggcgtgtattgtgtatgtaagcatttatcagaacaaaaatattctagtccctcgtgtatacaatatccttcaaacataactttattacagcatgtacactctctgtaaaagtcctctgtatcagcgaattgagtataaataatagtaatttcaagttttttgaaactagacttgtgaattcctgaccaagtataacgataaacttcattctttgggtcttcattgaatacaatatttaaatcatcttttttataattgttttgttgtaaaaaattgctaatagtattacaggcttttaaccatgcacttccataagcataaaatgattcagttgtagagcttgtaatagcttctttcggggatgtgtttttaatctctaattgataaaaagataattgtgataagaacataaaatttcctcttttcgtagtagtgttgataggtttttctctgttacctgttgccttatacgtaatgagaagtgatcggaatgcaagggaatagtattaaattttttagaattgatgttgagttgggcttttacaagtgtagaaatttgctaaacttacaatgcaaattgcggagcgacgtgaaagcataaacgaaacacaatgattcaaaaatttaatgccccttgcatgaagggaaggacgaattactatacggcaacaggtttcggtacgaaactgatatagaaccttattaatgagaaaataatggttttatttttaatagaaataaaaattataaaaatttttatacccttattgcctatttggggtaataagggtataatttagcctgaagatcgcaattgggtttgtaaatcaatcctttataccctttttggttattttatttaaaaataggtattatctgatcttactaacttattctaaggagggagtgaaattatgtttactcgaattcaacatttattacaaacgctatttactgacatgcaaagtacatttatttgggcattcattattggtggtttagtttgtggtctaatgatttggcaaggtgacgagcaaaatgcacctaaatttaaaaaaggtcttttattctgtggtgctggcgtagtagtcttcttacttgctaaaccattcgttgattacatcaaagctggtctataaaagtaggtgaaaaaaagtgatagagagctttagagaaagaaaggatcgattaaaaggggaaggtaaaattgaacttctccttaatatcgattcaaaaaaatatttagtaggtaaaatttcattttgggatttagtcatagtatcaccagctttactaatatcaattgtgggcatggtgattttttataatcagggaagtcttacaagagacacagctttaatttgtcttacaccaacgattacgttaacagcatttcagttaattaaacacccgattagatcaaatatatctttcttacaatatcggctgatatggaaatttaaatatcaaagaagacataaagaatttttctataaaaagggtgacattaatatgcaacaaaatgatcaagacataagaaaagagttaggtattcgtgatattttttcgagttgctatgaaacaaatgataatcgttttgtcaaagtaatagatgtatccgctgttaatttatcattaatgagtagtaacgagagacaaaaaatatttacttcctataaaacatttattaatgaattgcaattcgttaatgagattcaaatatcacaggtggctcagcctgttaatttatctaaacatttgattcatgtggataatattacgcatggcgaaaagaatccagcaaaacgaatgcttacaaaaagctataaagaatacgttgaggggattcaaaaaacaagagatatggttgctagaaaacgatatgtaattattgatcagccaattggaaacaatcgtgaaaaatcattaaatgatattgaaagaaaagcgtctcttgtaaccgctaaccttgaaaatatgttaactggacatgcaaggttgatagcaaaaccactaaataatgaggaattactacaattaatttatacatgtcttgattatgataatgcacagtctgttggtgaatttattatcggacgtgcccataattctttagatatatcattaggaagtgaatcggctcagaagttaattaatcagcttcaaaaacaagtggacgaaaatattaattaatgaggaagatggtacatgaaatatagttttaaaatccctaaattatttggttcgaaaaaagaaaaaaacaatttcgctcatacagtaggagatccaaacgaacaattactaacagcgattgctccttcacatattgtggagatggaaaacggggtgaaattagggtctaaccatacaagaacgttgctagtgttagactatgaaactattatccatcaacaaagaattcaagaattgaatgagttatctgaaaacgttagctttacttattatattaaggagtttaattcggctgaagttaaagaacaactttcaaaatcagttaaacaaaataaaatcaaaatgaaatctcaacatgccgatgcttacactgtagcggatgctgaagcacaggttgattcagccattcaaatgttaagagatatagcaacagctaatgataagatttatctatttcacacgtacattcatttatcttgcacgtccttagaagagttgaataatttaacaacattaataaaaagtagaatgggtgcaattggtacagcacattccccttctatacgtgctttagatgcatttcgtgcttttttacctctcgcaaataataccattccggaaatgacgtacagaatgatgaactctgaagctgtatcgtatttctttccgtttcatgaaaatgaaatgttttcagaaactgggattgtaaatgggaaaaatatgacaacaggtaatgttgtaattgttgatgatgaaaatttattaaataaacatgaattcgtaatcggtatttcaggttcaggtaagtctacgtatttgtttgctgatatgatgcgtaaatggcaatttggaagaagggttattgcaattgatccaaaaggtgagtttggaagcaaatttaaaaatcttggcggagaatgggtaaagttcaaattacgtggaggtaatagaattaatccctttgatcttccaaagattacttcatctacagaggaacttgatgctggaagtgttttgttagttaaaatcacacaattattaactatgtttaggcttatgtatccgtcaatgacagatttagaagaagatataatttctaaaattgttattgaagtatataaggacaaaggcattgattatgatacggatactaccaaaattggtgtaaaagatgtcccgattatggaagatttgtacaataagttggatgaatataaggaaaaggataaagaattgtatgctgaaattagaaatttccatacaacattagaaacatacacatatggtttgtatagtaatttatttaatggctatacaaacgtaaatatttcgaatgatttaattgcttacgatatttttgatttaaataataacgaaaaagtccaacgtattatttattataatttactgtctcataccacatatgagcttcttaaaggagataaaaggtcaacccaagtttatatagatgaagcccatgtaattgctgatcctaaagtaccactagctatgcaatatgtatactttatgatgaaagtcttacgttccttcaatgttggaattacaccagcaacacagtccattaaagattttatgagtgcaaaagatgaaaagcgaaactacggtgaggctgttattagtcaatctgtacaaaggttatatcttcctatgacacaagaagaggtaacttatctagaaaaagaattatctcatgagttttcagaacaggagaagacgaccttagttgtacgagaaggagataaggataaacaggctggtaaaggcattctattctcagggtctaagaaaatcaaagtagaagtacaactaacgcctttagaaaaacaattatggtttgaaaataaaaaaatagaagatatagcaatatagattggtgagatttagatgaatagtagaaacggaagttacattacttatctattgtttaaaaacccgtatattttagcgttttttctattgcttgtttttacgttcggattaatgtccatctttttctttgccgatgctggaagtaaagataattcccaagataataatatgggcaatggaagttatatgtgcacagagggacaagtaaatgaaggtgtatatatgaaggcctttgaaaaggctggtgtgtttactggaaaggggaaagattttattcaaattgctaggaaaaataatattgatccagttcttcttacagcaattgctttccatgaaacaggaagaggtacatctaacgctgtgaaaaataaaaataaccccgggggaatcatggggaaaggcggtttacgtacattttcaacactagatgaaggactagattatatggctggaaacttattcagattatatatatcgcaaggacttgttacgataccacaaatcggaaataaatatgcgcctgttggagcttctaatgatcctacaaatttaaacattcattgggttcctatagttacaaatatgactaatgaattaggtggtttatcaatgaattgtcaagcggtgggtcaaggatctggcggtgtagttatagatggaagtggaaatcaaatttttgatcctaacgttgtgtataacagtatggcaaaattcttagggcaagcatatgtgtggggtggagcatccccaacaggatttgactgttccggtctaatgcaatggaactttagacagactgttggcattaatctaccaagaacagccgaagaacagtatcatgcaacagcaagggtcagcaaagagcaacttaaagctggtgatttaatattcttcaccggaacttatgtcgggaaaactgttacacatgtgggaatgtacattggaaacggaaaaatgattaattcgaataattcaggtgtaaagatagatgatgtcttttcgccttattggggaaagtattattatggtgctggaagaataactcataaataaaatatgaggttataaggtgaaaaaaatgaataaaagccaaaagaaaataccgattataaatttccttttaattctatttctggttatttcatctctttattctttctcagtttataaaaagaataaagagataaataatgatattcatttattagaagaaaaattaaaaaaggaaaaagaaattagtgttatttacgatagatcaaaagagtttattgaaaagtctagtattgctgatcatggggatatgttaactggacaagcaaaggaaatgtttgaagatgcaattaagcaaaaagagcgtgagggtgctgaagacagtcgctctcactctattttagaaagaacagatatagatcatatttttgctgtgaaaacaggagataatacagcgaaatcatatgcaatctataaatctatctataattcgaatccatacgcaacagattcaatgccccagcaagtaatgactttaacaatgattgttgattgggaaaaagttaatggagaatataaagtttctgattatagaattaatgtcttaaaaaatagtttggatgattatctaaaaagtttagaaaaataatcttaaaagctggtgattattgtgaatgacctatcagacaaaatttctactttttacttttcagtaaataaaaaggtaaacaatttaattgaaaaaactatagatcaaaatcttgataaagaaaaaaagggcttttatagattgtatcaaagagatcctaatgattctgaaattctcgaaattaaaaaaactatcataatgagaaaaggaatttcattatttgctgtaatctttttaatcatgatgggtcttataagtattgcaagttaaaggagaaaccgctatgaaactaaaaaagatgtatcagatcttatctatagttcttttaatatttgtcacaatgaatattaatcttactacagcgtatgcaaaaaaaggtgaattttacgatcaaaataaaaaggctattgaaaaagaaattaaaaataaagacaaacaagagtttataaaaaactatgattacaaagataattactttgattgtgggacatttgatgtttcttgcaaagtttcgggattggcttatgaatcaattattgggacaataaaagtaacatatgatagtttgaaatcaactgtaattaaaccaagcgatataacaggaaataaagaatttaaaaaatacaaaaatgcatttaatagcctatcttcaactatgttagctatattcttgatgtggcaaatattaaaaatctattccatgcggtatgtagaacccgatggggatggttttttggtaatcaacgaaaaaatgattatgactcttacagctggggtgctattaggtatatatgatccatttataaattgggtattgggatttcaagaagtaattgtaaaatccgttttgtatgaaccaatcaaaatggaagaagtcgttttaatgatatttataaaaggttcattatatggtttcttcattgcattgatagtaatgtttgttttgtttgtattcgcattggcgtttatgtatagatttgttttgtttggactattatatgtcattggagttgtagcgatccctacagcactaaatgatgaatacaattacttctctttatggattagattatttgtaaataatagtgttacgttgtgtttacaagcattaacgttttcattaggttttatggcgctagtaaagaataatgcttttggtcatggtgtttcatttacagtagcgtttgcattctttattttggccttagcaattcctcatttacttggacaattgggagcaagtacaggttctagtagagcaattggacaatccttacgttacctttcaaggagaagataaaaggagaggactttatgaagataaaaaacataatacttgttggtgcattagcatttaccactttagttggttgtgaggatgcaaataaaaaaacagaaacaaatgaaaaagtattttttagcgaaaatgatatgaaacaagcaaaaaacatcatagaaaaggtattttacacatatgaaaatcatcaaaaacaattaacaatggacgagtttgaagaagcaaataagtctattgctcatgatatatccgaacaattaaaagatgcgtactttgatgatgtagaagtcaatatagtaaataatcatcatgaacgttcaggaaaagatgattttttagaagatcctaataattgttataagaaagaagaaggagcaatgctaggtacgtatgatccagaatgctttttaacttataaatttgaagggaataaggtgaaattacaatctcctaaaattgtatattataaaaatattaatgtgcatgagttaattattccaatgacttatgaggggaaagatttaatattaccctcattccattttgtaaaaaccaaagaaggaatgaaattaattcaaggattagggattagttcaacgatcttgaatgattttaaaactttagaagataaaacagaagaggaacttaagattgaaaaacaatctaaaacgctaaaagaaataaagatgtataacattttttaagaaatatggtggtgatagaacgtgcgagttaatattaataaattagcaaacatagaaattgaagataatacactcaaatatcggattccaataacagaattaaatcaagatgatcttaatattattgaaaaaaatcttaaaagaaaaatacagagtatagataatgatccacattatttagttccatttgagatgcaaatattaaatgcatctttaatactttattatgacatggagaaatataaaagttttgaataccttagatcgttagaatttagtgagcaattaaaatatttttcatccatgattcaaatagctaaaaatagtgtgcatacaaaaactttatggaataaatataattttgttttagacgaatatgaagacaagatgaaagtagttatttatgaaacaactgatttgaaaatttatgacataaaagactcactaattggcgttaaggagttaattttgttaagtctaacaaaattaactcaaatttatggaaaaccacgccgtacggactttatagatcctagtgatgaaataattcaatttgcggaaaccttgttacaaattgatgatcttgaagatctagatcattttgttaatacaaaaatgatccaatcagaacactttgaacctgaagaaacggaagtagaagaagaaaaggttactaaggataaaaaatggagtttaaagttaaaaagtaataaaaatgatataaaaaaaagagaaaagaaacagcaacagcaaaagaaaaagaaaaaaaataatagcaaaaaaacctatatcatattaggtagtgttataatattagccataggtttaaattttgcccttacttctttaaatgatagtaagagtgcggaaaagaataagcaaaatgcaaagaaacagtatcatgctgaagtcttaaagaagaataagcttgataataaaccattgagccaagacgaaaaggataaactgtttgatgcatatcaaacagctttaataggcgaaaatcagaaggcaattgaatcattagaaaacattggatatgaaaaccttcgaagcgtagaccaacaagtattagataatttatacaagaaaacggatcaggtatataaattatttgataagaagccttctcttgtaaaaggtattgtaaatgaaatgctggcaaataataaaggtgacgaattattaaagattcaagagaaaatggaatctaaaagtccatatgtagattttgaagttgcatatattaataaggactggaaaaaggttgttgaattaaaagatgaagtagatttaaatggaagaagagaaaaacagattgtagaagcgtttacgtctctgaagaaatacaaagaagctaaagattttgctcaaaaggtcggaaatcctgtattgttagaagagataaaagctttctctgaatagaggtgtgaaaaggtgacattattaaaaaaaattgatcatacaggtagaattactttgccaaaagacttatgtggcaaatttggtttaaagaaggatgatcaagtagaaataacgcatgatgaacagtttattaaaattagaaagcatcaacctgagtttgtttgtgcggtgactggtaaaataacagatcaaggacaaacaatcgggaacgcttttatttcctacgaaggcatagaacaaatcctacaagagcaagagcatttaaaagaaaaagaaaaaaagtaaaaagcaatccctacttatagatagggttgctttttacttttttatttaattagttttagattcgtttaccgcaataatattacattttttcttaaaccttcttttaacttcttcttctaatggtagtgttatatttttctctgagaaagctttaactgtgtgttcttgcacttcagtatggtcttcaatctgatatgtaataatataagttttggctttaaatttattcatgtgtccccaatccttgtcttctatttagtattaaatttgattttacgtatgtaagtcggtagaatttggtttatattaccacttgaattaatgcaattagtagtttattctataacttatcaaagttcaaaactattattctgattataatgatatatgtatttcggaaattatcactctcctattattactcaaacaattaaattgtagatttcttctcctgtatactaaaatagtacatttaccaacatcttattaaattttataaattctagtataacttgattataaactacatatagtttataatcaaatacgaatgtaaaataaatatggtttaaattataaataatgaaatatatagatattttgttattagagaattgttaaattggagtcgaaccctgtttacttttttttagttgctttatttagttctttttttgtaaatttaataactgaagactcaaaccaatatggagtttcagcaataataatatccgcatcaattatctttccacgtttataataagtatggaatttcccctgtgaatatggaactccgctctgagttaaatattctgagaacattttttgattatatattttttctttatgaagatcttcctcagaaatttttaatatgtctttttctgatattaaatttgtatcttgttgaaagaatttaataatagtttgtagtgcaaataagagatcattatcttttaaatgtgtatacaatgtattcatattaaatgaatataaacaaggatcgttaataaaaagtgacagttgataaaatgtatcttcaacattggtcaatggacatagagcaccgttcattctttctttaacctttgggtattttttataaatttcttcaagagattttttcaacagagttcccccctttcgacacatcctcataagagtaatgttcaaataaatgtgtatgacttaacttttgaaataccaatttaatttttccccaatcgctttttttcactcaatattgttaaacaaattttgtttaatttttttacagttttatttcctacaaaaaaatattttccattatttttatataattagatatatatgtaagttttaagtgtgttttataagaaaaaatacgcttttttgtgtactatttcagagtatcaattgatgtttataaattcaacaatatatgtataaaaaataaacaaaatatgatataattttaaaaaaggaggaatctacaattgagaacattttttgttaaaagattgtttggttatcccttattatacgctttcatttggtattacctatatcaaaattttacagatttgtatttcgttaatattgctgtaaggcaaattaacagtatcgtaagagaattcccttttatttatagtaacatgagcacatattttatattatttggttttatatttggatatatttactccactatctcaacgcttgtaaaagcaagagaatttagaggaatattgtttgtatgtgtattatctactaagacattgtttgccattataacaattccctttggaattattatgttttttgtagagtgtatgtctcttattattattatgacaagtttatttctatttagaaacatgaaatatagatatctagtcaattaattatgttcgtgtttcgcaaaaaaacatagatattaaaatttcaattaccgaaatgatactataaaaattcgaggtgaggaaggtgaacatttttagggggatttacgaaagattatttatagttatttcgattacccttatggtgatcctttttttatgctgttatgctggaattatttatcctgaattaatacagagttggtggaatcttatatttgtagttattatgggatatttagttttaacaattttgttctttgcatgttataaggatgaaaatcttgctaataattcaaagaatgaagaagaattttagggcaaggtgaataatgcatatgaacaatattttatttgcttgtattatgttgtgcgtaatgggaattatttgtaaatgtcaagataaacatgtacattttcgcttgtttaagcatgtacaaaatcgattttgtacatgcttaaacaagcgaaaatgtacatgtttatcttgacatttacatgatgtcttccttatcccattttaagatactgtgtaataaatatgtgattactctgcgggcgagtttattatccaaatcttctttccaagtatttggagggaatcgtttccttttgccatccaatatttcttgataaatttcttctatcgtaactgctttcattgccaatatataaatcctcctatatttgtatttatatttgtacaatatcactatcagaattattatatatatattatataatttacataaaattatcatcgaaaacaacacataaattagttttttctcaaaaatctaattattacacaaataaaaatttatttaaattttctattttttggtatatacttaaaaatgaattattatatttgtatattaggagtgtatttgtatggagaagcttaacaaaagcgatatcattcgcaccgttccacaaaatggtttctttggacatccaaaagggctatttaccctattctttacagaattttgggagcgattttcttactatggaatgagagcaatattactttactatatgtactattccatttctaaaggtggcttagggatggatcacgccacagctgcatccattatggctatctatggttcgttagtttacatgtctggcattattggtgggtggattgctgaccgcctattaggttcaagtagaacaatattttggggtggcgttttaataatgattggtcatctcatcttagctctaccaggcacggttagtacattatttatctcaatggtatttttaatacttggaacagggttattaaaaccgaatgtatctagtattgttggtgatttatatagcgaaacagacactagacgtgactcaggtttcagtattttctatatgggtattaatttaggggctctattatctccgtttgtgattggaacactcggtcaaaagtataactttcacttaggttttggtgtggctgcaattggtatgttatttggattaattatgtatgttcttacgaaaaagaaaaatctaggattagcaggaacgcaagtaccaaatcctttaacagacaaggaaagaaaaaaggtccttatacagtttagtattggtattatcgcaattgcactagttggtgtgttaacaattccaacaggtattttaacgattgatcgatttactttacttgtaagtatcttaggtattctaattccaacaggctactttgtctttatgtaccgtagtccaaagacgacagaagttgaaaaatctcgcttaattgcttacataccactatttatcgctgctacaatgttttgggcgattcaagagcagggagcaatcatcttagctagttatgctgatcaacgtacgcagttaaactttgcaggattggaggttcagtcttcatggttccaatctttaaaccctatttatattgttttactagcaccagtatttgcttggctttgggtaaagctgaattcacgccaaccaagtacagcaaataaatttgctatcggtttattatttgctggtttatcattcttagtgatgattattcctgcatatatccatggtaccgaatcccttgttagcccaatttggttagtcattagttttcttctagtcgtaatcggggaactttgtttatcacctgtaggtttatctattactacaaaactagctccagcagcgttctctgctcaaacaatgagtctatggttcttaaccagtgcatctgcacaagctatcaatgcgcagcttgttcgattatataatcctgaaacagagattatttatttcggtgtaattggcggagtatccattgttttaagtgttattttatatttcatggctccaaagattcaggtacttatgaaagggattaaataatagaactgtgccaaaaacttgttaccatgcaggtttttgtgcacagtttttttagtgctttatcgtatgtaaaactagctccttttaaacgaagaactacaaaggtaaattgatcagaagtaagtcatttatcgatatggatgattaggagaaagcatttacggtaaccccaagtcgagagtattccgatactaatatagtttatacatctaaccctatttaataggttagtgttgaaagatggaactcccgcattcgaaaatgatgtacataagttttccaaatgggcagcttattttttgttttggggttacttcaatatctaagctaaatgcctatggagcaaaactaaaaaaagacgccaaatggcgcccccaacttgggttaatgaggttttagttttccaatctaaagaaatatcgtatcagctcacaaagagagtatatcataacatccaagagaaataatatgcattcttacatatcgaaataaattttgtattcttgcactgacggaccaggaatagcaagatatgaagcatataagcgctgtaaaaatatcaattcatagaagcgattaatttctgatatgacatgttttaatatcacaaaagccatcacgaaatgatgattgcatgatggcttttgttgttttcttatttctttgtctcattgacccatgtaacgatgtcctggatgacatacgcaggaacattggaagggacttcgtattcactagggtgactgaattccccgttgccctccgtgaagatgtgattcaatttcggatattctttgaactgaacattactgcggcttgaaagcccttcttgccatctcgtaaaatcgtcttttacagttacttgataatcacgtgcgccttgcagaatcagtaatagctcttttcgtgatttcacttcctcaactggacgccaacgagtcacatcatacatgaaatgtggagaaggataattataaccagctggtgggtgatttggatcaaaagtaggatccttaatataagcgaattgtttttttagttcattaataaaatccttaggtgccccgaggtactgatactgatcaaggagcatgtcagtaaaaggacgtgcaggaggtgccattaaaatacttcctcttacaagagatgaaggtgctttgcttagtatacgcggcatggtcccagctccttggctatgtccgagaatgaaaatgttacctgggtcaataccttcctgctgcgctgctaatttcgctgcatatatggcatcatctgtagtatcttggtctaatgtagcaggttctgcactcattttaaaaccgtgttctaaggaacgtttctcgtaacgtaacactgcgataccgcttgatgaaagaccggctgcaaggtctctaaagattttagctcccataattgtactgtcacgatcttgcggacccgaaccgtgaacaagaacaacaacaggcactttttcgccaggtttatgttttggaaccgttaatgtggctggtaacgggtatgtagtatttccaattacgatttcacgttcttggtaggaatcaggttggtcataactaggatgcgggatggtataagatttctgttgcatcgtccttacgccaacttcatcaactttgccgccaggcgtgaatttaaggagtagtggaatagtagttccttcgatagctcctggaatttcaaccgtttgatggactaagtttcgttctttaataacaggtgttcccatgcttgtaatcctgctcccgccactttgtgtccaccagttttgtaatatgtttgccgtaaacttggattgaaaagcagcagacgtcaactgaagtgcttctgcatatttaccttgctggagatagtcaaaaaataatgacgtacgctccgttaaagagacttgtttcttttctgcagtttgtgccccttgtgtatccgcatgaatggttgttgtaagcggaaaagaagaaatacctaaaaaaaagagtagggtaaaagaaagtgctgatttttgtaacttcttttttttcatcctgtttaacctccaaaatgtaatggtatgaaatggggatggtaattagtggaatgattccctattggggtttcggtatatgtatgggtgaatcctgcatacatatcataaaaagtccgtatgaaagagtagaagagtccagcaatggatgtttttcatgttacaacggataaggtagaagttcaaatgcagtttaaagatgctgggagtggaacggtggaatggattatgtgcgactggaacacaggtcaaccgttatatcaaagtgataaatggaatgcttatagctaattacaatttataattatcacatagggaatagatactagataaaaagaattaacactcaaataatttcaaagtagtatattgattttaggcaggaaacattcaatacgcatacttgggagagtcgacatatggacttagaattaaaggtaaagaggaaataaatacatactacaaaaactacataatgatgaatatccgtacgactggaaactgggtcgtatagagaatggggataagtttcgtagagaaggtgaagtgaaaataggatctagtttaatagagtaaatgcacgagcaggagttgcttggtacattacacaggtagtcttcatatagaatggaattttatgtaccgattactttaggaaagcattctgtatgcaattcaaacaaatgcaaatcaaatcatgcatttacagatacaaaaaaggagctgttagtaaagctaactgctccaggtcaaggaatctccaaggggaaaagagaaagactaaggactttaaatgagttttggctaatgcctatccgtattattgacggaataatgagttttattcattcgtaacgaaattaatgtgtaagtatgttacaagaatagtccaatacctatccatgcaactcctaatatagacaatgattcgataataattaaacgtttagcctcatcttgttttggtgtagttagtttcttaattagagagaatagtccacttattccgcacaaagtaagagctaatagtagtaaagtacttgtcatcctgatcactcctagtatttggatattcttattgtataccaagctacagactaaaaaatagtaatgttattgtatcttttctatgaagcatgtacagtgtgacgtgaatcttcaatggatagaggtcgtgtaaggtaaccttcagtattagaagtatgaatattgcgtgaaaggaatgcagactgttgaaaatataaaaaacgtatagtacaataagggtgtaagctagattataacgaacaagaagtcgggtggttctgattctcgttctattgataggtcgtaagctttttgaaaagtcttggtttggtcaccaaggctttttttcgtacgcagacaggaataaaagcactgcatgtcgcaatactatatagagtagtaagctgggtttcaacgtctttgcacttcaaaatgatactgcattggtcgtgtgcaatgaaagtatggtcagtacttcaccttggaacccaatcataactacaaactggtcttagtgtcgctacttatagcggcacctttttatttaagaagatgtcttacatattcagttatacccttacctatttcacttttggtaaaaaagtaatgtatatttctaaggaaactgaatgctgtaacgattgtgccaaaagaaaaaagacgcttacgtttcttttctctctctgaacgtttacgggtggttctagtattctccacgttctattgtcacctcctctaaaaagagaagggcaaagacggcacgtattcagtgtacagtgtttgacaaatctctacaagaacttattttctggtatggaacattcaaatatgtaggatcaatttcgagtaagatgtttgaagaaacgtacaaaggttatatgtactgattctcttttactagataaatagtatcagtggatttacgatttttttcatgttgtaattaagataagttaatggagggaattagatggttcataacataatacataatagatttaaactacgagaaatcgaagaaaatgattggaaggatatacatatatacacatcaaagtccattgtgtgccgataccaagcatggggccctaattcggaaacggaaacaaaagaatttgtaaaccaagttcttcaagatgcaagtaaggtcccgagaagtcgattttcttttgcattggttgaattggattacgaaagagtggtaggggcaggtgagattaagattcgagattttactaatagggagggaaaaatagggtataacataaatccagattattggggaatgggacttgcaacggaagtagcaaggttgctgattatatttggatttgaggaattaaatcttcatcgtatttttgcgacttgcgatccaagaaatataggttcgaaaaaagtgttagaaaaaaatgaaatgacgaaagagggaaggattcgtgagtgtatattattaaaagatggctggcgtgattcccttctatacagtattttggaacaagaatggaaagaaatgaactaataagtgtatcctttgcgtaaaagtactgcgtgtaattgggctatttagaggaattaaactataaaagaataaaatctatattctttatgagtgcatagaaaaaagtgagggagaacctcactttaatttttcgttattttcttcttccgctggtacttctcgaatgattttctaagcggcagcacgtatttttcttttgtcatcgtttgtactccttgcataatatcttaagaatgtagaatgtacaatacatgtaactttctatttattatttgaattcggtactgaaaattctagcctatctaatatgtaaaatatgatttctagcaatatagtagataggctagtgaaaatcaaaacagcatgagatgacataaccacgaacgtaatatgtaaatcgaatagcccaaaatactctacatagaatgttagaaaagtagagaccatcgacaaattacatcaaaaaatataatcaaaagcaatgtaagtttgaggtaaagatttactcaataaaaaatagagatgcatgaaaggcgtgggaactaataaattattactaatagatagaaggcattgagctcaaattaaataactttattgttgatttttgagtacaagcacattgatgcaatagtaatttaagagctgcgattgtagctctttttcttatgtagctaacggtgcagttagtggaagaaggattttaatttaatatgatgaaatatgtaatcttctaggtgaaatctaagaaggaggtttaattactataaaaaatgatttgtagaacgaatgtaagggaggaaagctaacttggaaatcacaacagaaagattaattgttagactttttaagagtactgatttacaggatgtatttgctatttataataatgatgatacctaaagaaatacaacgatatatgttacctatagatgtttcttctaaaagtgcaaacaatgaactagagctagcctttgcaaatacgaaggaaggaaaatggttgagggataacacacagcgagcagggtttatcattcgttactcaaaaggtaaggacagtataacaggttatgcatatgaaccttggcatattcgttatgtaggagatatcgctgagagtatatatcaagaaaagctaactttagaagaatatatgaatctaaaaaaataaagaattgatttagcatatatcatgatgaatgcggatgtacggatttgcacttacatgaagcagaaagcatacagaatgaggatacaccgagtggtaaagtaggggaggaatttgacttgaaaaatggctatataaagggatttacaataaattacttttaaacagtttacataacatatctaatagggatttataaaaaacaagtgaataaatctcaaaatgaaaagaatacttatatcattgagacagaaagaaaaatttagtagttacattttgaaatctgcatttaaataatatttagcggaacgcttagctaaaccgactacaataaaaagaattaaaggaaatgctctatttcgacatcacaacaattaaattttgaaaaatacaccaactatttagttttaaggagttaaagcaaactgttttgcattaaaatgttatatattggataagttctataagcaagcatttaatcaatattaatatgtatagctgactgtacccgaaactaaaagacattaatactgatgaaaagtaaggtatatgatagctttataaaagggtggaaaaataaacactcacaacttcgcacgaaataccaattttacgaacaataagatagttaaataaaaatctaatacagtatttaggtattttaagctcgttagcatgaatttctttatatttgtatgtgcctatataattcatgctttatatagaaatcattaaatgctaagttagtcattaatattttttatagtaaattacattttaatttataagattttttcttaagttcatctaattaacccctcataatcatgcttaaattaaccaattcatgttaaataacgaattttaaactgtttttatatattaattttttgtatgaatttatatataaaaattgttttattttacatgcatttatatgtaatttttgcactgaattttatggtcttatacaaatttatcacatagttagctataattttcatttgactaactacactgtaccattcagttttgaacatattttagtatttcataatttaattatgtaaataagtttgtgtaaaaattgaatttaacgcgaacttgtgttcgcctcttttttctgttatattatatatgaggtgatttttatggactacagcaaacaacgtcaaaaatccgtacatcgtaaaaaattatacgaaaatcttaatgaaatgcccttttacatagaagaatttgtggagtacaaagaattgcatgatgcctctccctccaccctactgaattatgtatatgattttagagtcttctttaattggctattatctgaacaagttattgaattaaaacccattaaagacatatccttcgctgatttggagaatttaaagaaaaaagatgttgagaactttatgagatttctaaaactacaacagaatatgcagaattcttctgttaacaggaaaatttcagccttaaaatctttatttaaataccttacctccctatcagagaacgaagatggagaatgttatttttatagaaatgtaatggctaaaatcgaaattcataaagataaagaaacattaaatgcccgtgcaaaacgtatgagatctaaaatatttcataataatgatgatcaagagtttttaaattatgttaagtatgagcatgaaaaatctttaacaaaacatcagttgttctatttcctaagagataaagatcgcgacgtagcaatcctctctctttttcttggcagtggcattcgtgtaagtgaattggcggatcttcgcatggaagatataaacttaaaagaaagactcattgatgtaatccgaaaaggaaacaaagaagattctgtatggattaccccaattgcattaaatgatcttgaaaaatatatggaaattcgagataacaaatacgctccagggaaagaattaaaaaatgtgtttctatcaaaatataaacatactgcacagcctctttcagttagggctatccaagatatagtagaaaaatatactaaggcttatggaaaaagaatgtctcctcataaattaagacatacattggcaaataaattatatatggaagagaaagactcattacaagtcatgcagcaacttggacatacgagtcaagatacagctttgctatatacacaacttggggaaacaactattaaagatagtttaggcagaataggaaagaataaggaataaaagttcagcaattttacattgttgaacttttatctttttacatacttaagatttaaacgctatttattattctttttaaatttgattttattatgtaaaaaatacataatttaaatccttctataattggtatatacatactctctcttgatggatatacatgaaaattttagattcctacaattgttggttacgttaaactcgaatttaatgtgaaattgttttctttgttatcaacagcttctctagactttatatggacctcttatttcccctctactctttcaatataaaatacaaacttaaaattagattacgaataactcttttattactatttatatttataacttgtgtagagcaaatttaagtaaagaatccagaggcaataattttggttctgatgcaaaaacactttactacaaccatagaactgcaatatcctgttaacagggagattaaacagctaatccaaacaatctatgaatgaattcagcttcacttcgggcagatttcaccctttagtgaagttgcccttttttcatcatatgcatagcttcgatgtcacttaaaattaaagtagctgtacgaagtgaattcaatcctaacatagaacgaactcgcttcttgataaaacgatgatcttgttccactatgttattccagtatttctgttgtctaagttgcatactgtcaggtatgcttttcgcctttttcaattgttcaattgctataggataagctggattcttatccaccgtaatgacgcgaggtttagaaacatgaaaagaccgcaaagctttcttgaagaagcgctttgcagcctttgtgtctcttgtttcactgagataaaaatcaatcgtgcttcctttggaatacactgcacgatatagatacatccattgaccttttattttgatatatgtttcatcgactttccatgagtcatttattgtcttaagatgacgccgtactctttcatctaattccggtccatattgatgaacccaacgcataatcgttgtgtgagccatcgataaaccgcacttttccatcctttccactacattacgaaaactcaagttgtaccgcaggtaccatctcactgttaacaaaataatgtttggttgataatgcttccatttgaaaaaacttttccttttccatccgaatcacacaccctttctagagtaatagtatcagtatgtccaagttttatagatttattgtaattattctgaagtttttgcaccagaatcctataaaatgactcaatttcaaaaccactgtttccaattgaagttataataattcattataaaattcttatatttaactgtattgtaacattcgacatgcgcaagctattaatttatatggtaacatttacctgtaagacgaattattaatatgggaggcagatttattatgaaagcaagaaaaccaaaatcatttgtaaaacaatgtacaggaatcgcgttggccagtatgattggatgtagtggtattggagttttcgcaacaagtgtaagtgctgccgaaaatactaatccagctcctatgaaccaatctcttcaagcagaagtgatgactattacacagttacaagatgctattcagcataaaaatgatccttttattaatcaagtaaaaaaatttattgataaacacaaggcagaatcagaatttttatgggggaaagtgagtacttcattgaaaaacgacattgtagacttactcacaggggacaaaaaaaattactctaataaaattaacagagcccttgtaaaacactttagagaagtccctaaattattgaaactagcaagtccagaatttaaaaaagaaattattcagttactaaattacctataagatatatattaagattttatatttcaatggattttgatattagtagttccataaatttgtatttacaaggtacctttcagttaataaaatttatatataaaaatgtataaattaattaggtgtaaggattggaaatagatttaaatgcacatacggtaatcaaatttccatgttttaaatataatctgtcgggtaaaagactggcgcggtatcaattgtgacccgtttccagcctctccccataagaactgctcgtgaggttttccctcacaagcagctcaccccataaacttcatcaaaagggttatgagacctatcaaatggccccgaaatgggcagtagctaccctcttgctaatcgcaggaggatgctacacatcactggatcatttcttatatgattgtagtcatgattttaaaaatggtagccttgctttcctatcaagtgggaagagtatcggaaatattttgcctgctattatcaaagataggatgcaagctgtgctagatgcttgtaaacaaggaaaagtggccagagtaattaatgtggaaaatgcccatgctagaaagtggtatttctatggtagcgtcattaatagttatgatgtatataaggggaatgtgtcaggtattctagaatcctatcacttaagttcgtacagaaagctggataccttatcaggggcagctaagacgcgtatggaacgtaaagttgaaaaagaatttgagaaaaccgcacaaatgttggctgcttatcactataaaaaaacaggcgagaaacttaatgaaatatcttatcaagcgaaagggtctgtatactttgatacagccattcagttagataagaagagaaccaaaaagtattggtctacgaatcatgagatgtttgctagagcatttgaatcgtatgtagaatcagctttgctagatcaagaacatagaaacgattatttagtttgtgatacatattcttttgtatatccgttaggagaacaaagagaatatctgaatagaagtataaagagtttaatggaagtagctgttccatatataattaacagtatacaaggagtggggaataatgaattataacattcaaaaaggtcaatttcgtttaacgagtgcttatccaagaggtagctggtgggaattttaccgtgttacgtgtccgatttgtcatgatacaggtaattgcatgctgcatgtttcgcaagagaaggtagcatgtacacgtgtagaaagtaaatggatttacggaaaaaacacgggcaacccaagctacattcactacataaatggaaaagataagtatcgattgcctgaggcggatgaagttcagattcatgataagaaaagcaatgaggaattagatgtgtttaatcggaaattaatggatttcataccattgcaggagcatcatcatacacatttattacgagatagaaaaatgagcgaggaacaaatacaagtacgtcaatatcgatctttcttaaaacaacaaattgtgttagagaaggataatacgtatacgactgtttgggaacagcattttaaacagatggggaataaaaactgttggcagggggttccgggcttttatgagatgaggaagggtcaactttctcttcgtttgatgtcaggatctcctggtatattgatcccttttcgaaaccagtacaatcaaattgttggatggcaggttcgtgtggatgaagtgaaaaactccgttcatgtgaaatcggcacccaatggagttcaagcggaattaatcgaacagcctaatgttgtaaagataactaaaaatggtgattgtatctttgaaggcgaactagaagtgagcaaaaagctagagataccatttcaagagggacaaattgttgtaaagatacataaagggcaaaagtatctgtggctctcatcagcaaacaaaaatcaggggactggtgcaggtggtagtgaaaatccacttcctgtacatgtagcggtaccgagttctcatttaaaacattggaattctggtacattgcatcaaactaaatcagtaatgatcacagaaggacccatgaaagctgatttgattgctgatttgattccaaagcgatttaataaagcagaacttattgaagtaggaacgacggttcttgcgattcctggtgtaaacgcttggcgaattactatgcctgtattaaaggatatgggtgtagaaaatgtctatttagcgtttgatgccgatttagtagagaatcaaaaagtaaggaaagctcttatagactttgcgacagagttaaagcgattgggctataacgtaatcatagctgcatggaacccaacgcaaggtaaggggctggatgatacaatgcaagcgggatttaaacctgtatttcagagattgtgaaagttataaagtaggttgatattttcataaataggtagattgaaaaagatagagtttttaattctatctttttcttatatccaattaactaaaagaagggtagaagagaatatgaatacatctatgaaaaaaaaactagtgaatttacgagttgattttgctttcaagcgcttgtttggagtagaaggaaatgaagatatattaatagggtttctgaatgcggtactacaatcatctattgatgaagaaattacatctttgcacttagatgatccgcatcttccaagagagcagaagggtgataaattatctattttagatttgcgagctactctgaataatggtataaaattaaatatagagattcaagttcgagacaaaaaagatatgatagagcgctctttgttctattggtcaggcatgtattattcccaaatgactcaagggatgaagtacacggaattaagaccaaccatttgtattaatatagtagatttcatactatttccagaagagcaagagtttcataatgttaatacagtgatgaacaaaaaatctaagcgtatcattacagaaaatatgcagttgcattttcttgaaattccaaaagtaattcaagaatggcaaggagaacgaatgaatccatgggaagactctttagcgcgttggttattattatttcctgcgcatgaggatgagagattaacaacaatcctggaggcgatagcaatggaaaaagatccagttttgaaaaaggcaatagaggattgggagcgtttaagtagcgataaggattttttacgcttatatgaggctagagaaaaagcaataaaagatagaatatcagaaatagaaacggcagaagaaaaagctgcgaaaaaggccgcagaaatagctaccaaaaaagccacagaagagactagaattgcaactaagatagagatgattcacaatttaattaatgtcggtatacctattgagaaagtagcggaagccactgaattaagtgtggaagaggttaatgaaattttaaaaaataaagagtaaatataaataatattaaataggtaattgtgattacaaacaattacctatttttttattatttttgattgatgcccattttgtgattacaactatattttttcttgctttaggattccctctaattcataacgaaattcattagtcttcttaacatcctttaagattgcctcaagatcctcttttttaacaaattctctaatggaatggttaaataacattaatctaccgtatctttgttcaatctctttaaaccacgtttcatttttcaataacttaaagtttttacgaatcattttttctttttttgaaggaatggacataaggattcccccaaatatatcgccaattaagtcacccatgaataagcctcctttttctacattgtaccattcagaaaaaacgatgtgggatcaaaaattcaatacgctataatgaaattaagagaatatatacgagggaagaggaaataaatatgaaggtaaccagggatatgctacatgaaatgatagacaaggtaaatgaaagtgaaatacataaaatatacgatgtgttgcaatctattttaaatagtaatgaaattataattacccctagagaggcagcgttaagaaaagcgaaaaaaataaaagttgtttcgttagatgcattagattcattttttgaagagaaagaataattatatacttaatatgtaatttttatatatttaaggacgttaagaggtatgttattatgcaaaataaaaaagaaggttattatgtacatgtgtatacacttagagacaaaagtacaaaatctataaaaatagaaccatcgtgctcattgaatgaagaaatgaaagttttaggtcttacggacagtgatatttttcaaattcaaatggtatggtacgatcctaacaaagagcataaaaagtaataaaggtgtaaataaggggttgtatttttaaaatcgtattgctataatataaacgtaataagattttacaataaaatataaaattaatcagttcgcatataagagaagacctcaatatgcgccatgtccttaggggacgtgtgcgtgtattggggtctttttgcgttttgcgagcaaaaacatccggaggtgcaggaattatgttgaattggttgtctgcaaaacttatgacaacatcagtaggagatttcttactggcaaaaagtagctttacgaaaggtcttggtggtagtggcagtggtgccaatgctgaaactgtccaaaaaagcatgaacacattagtgaaaactttaattggttttgggggaatttgggtggcagcttgcgttgtattcgcagctattaaactatctggtgcacaaggaaagaaccctgaaaaccgtacacaagctatgattggtttagcttgcgcggcaattggaggctttgtcatgatcaaagcgtacgacattgctgcttgggttacaacaatctaataaaagagtttgtacaagctctcctccatttggggagagcttctcttatacaagggaggaaacaaaatgagaaaagtaactgttcctgttgatatgacttcggaacaaaaaacgctgttaggtgtattaagtaagcgccaattgatttatttattaggtggcggggcggccctttatttatatgtaccatttttatggcagttgtttgcacctattgatgcggtagtagcgttttttatttgcctaattttagcactaccaacggtagtaggtgtaatagcgtttggttttatttataaagaaaaacaacacatgtatcttgatagatttttacttatcaaaatgcgtagccgctccgaaaaaggaaagtggagaaaagggtacgagccaactacatgggcaaaggagaatttataaatgttggaaatgatatattttgcggcgatagccattgtagggtttttcttttatcggaaaatgaatggaaaaccgctgtttggttctaagaaaaaggggaaaaagcaaggtggagtagagaaacatactgctgaaaaatctggaaagaaaaacaaaaagaatacacctgctgaatcggaaattgatgaggataatgttgatttctttcgggattttgtagaagacattaaggaaattgataatcacatgattcgatatcatgatgacacatttgtcctaattgcggaagcacatccggttaactattacttactttccaatatggaacaagaagcgattgatatcaaaattgaatcatggttaaccacattagagtttaatacgaaagtatatattcaaagtaagttcgtagatttaacagatcctgtacgaaaaatgacagaaacgatgaaaggtgcgaaggaccttacaccagagacggttctatatggacaagaagttatcgataacttagagtactggcagcgttcacaacctcgatatgaacaaaaacgttatttaatttatccatataaggttgatattagtacgattacggctgatacagaggacgaattagaagaaaagattgtagataaggcatttaacgaactatatcgtcgttataatgcatcccgaaatctactatcgaaagcaaaaattaatgtagaaatgttaacgaaagataaattaatagaacttttatacgtagcatttaaccgtcggaaagccgtaaaagctcgtttccaggatttaattgaaaacgagaatttctcgctctattcaacaggggaaacaaatgaaagaaaactagagttaatgaagaaagtgctagcagaagaaaaagcagaaaaatcaaataatggggtggcgtaaatatgaagttattcggaaaaaagaaaaaggaaaagaaaaaagaaaagaaaaaagtagaagccgaagagaaggatgaattggagctagaggaggaagagctggaagaagaagtaccgacgcaattagacaatcaaacaacagtgtttgatgttattgctccagaaggtatgaaaattgatgcagaagattatggagttattaaacaatctttaggaagcaatacgttcttccgtccgttttatattccacgtgatgggtacccacgtatgatgcaaaccaattggctcaacatgttaacttcggctggagaagtggatgtcatgatcgatattcataaagagccaaaagctaaagcaatgcgatcattagatatgcagctgacaatgttacgttccaatctttctttccaacgtacacgaggaaacattgaccaagaaaaagacttagatgcaaaaattcaagatacaaacaatttaatggatgaaatccagttcaatgaaaacgactcttatatggtgagtacgatggctgttgcgtatgcagaatcaaagaaagaattagacgttttatgtgaatatcttgaagatgaaatgcaagcatctcactttaagatagcgagtacttggaaccgtgtgaaaagtggtttgaaagcggttatgccattaggtgcaccaaatacgctgcaagatacttatcgaaatatcgatagacgtgctctatgtacatttgcaccctttgtatcaggatccggaagatttaacggtgggataccaataggaaagaacaaaattactggccaagtagaatttttaaattcattcgggaatgcagattatcgtccaccaaactataacattggtgtgacaggaatttcaggttccgggaaaagtttacttttaaaaatgaagctagctcgtgaaacgtcacttgcagatacacatgcaatgattatcgatccagaaggtgaattcgtaaaaattacaaaacgtttaggtggtattaatttaaacatttcaccagaaagtaatatcattattaacccttgtgcaatcgctgtaacagaactgcaaattacagataaagatgaagaactagaagcgctggaacaatacgataagaaagaactcgtagagcgtgatggcgtgaagtatgtaagatttgtaccgattctagagaaaatcaatgaaatactcggattctttgacattattatacgcggacaagattttgatcaaccaggattaaatgtattccaacgtacaatgctagaagatgcaatccgtgaagtgtttgataaacatggtattacttcacatccttcttctttatatacagatgaagtgaagaaggtggatggacaattaattcagtctcaagtaagaaagccagagccagagttaaaagaaatctacgatgtcatagtagaaaatcatggagatgatgtgaaggcagaagagttaatcgccgcgattcgtccgttcttacgtgatggttcaaaaccattatttgatggacaaagtcattttggtcgtggtgtagaaacacagttaaatgaatcacgcgttgttaatttcaacattagccatttagaggaaggatttttaaaaccaatcgctttccacgttatcttgaactatatttgggagcattggattaagagtccagaacatgctatcaaacgaaaagtactgtatgtggatgagatgtggcagtttatcgattatgaacaaacggttaacttcttagaaaaagtagcacgtcgttcacgtaaaagaaatgccggtatgtgttgggcaagtcaggactttgttcgtatcttagaaaatgtaaaagctcgtggtatcttgcaatctactttctcttatttcttcttagaacaaaataagattgataagaaaaaaattcaagagaactttaacttaactgctggggagcttgatattattctcaacaatccaggaaaaggagaagggattttccgtgtaggagatagttcggtttggattcaaacagatccatcagataaagaaatgatgtttattgaatcgaatgaagcggtacttcaagagcttctaaacaatatgaagaaagtacaagggtacgcaggatagtagcgtacctttgtaaaggaaggtgaaattatgcttgagaaaataatagattgggtcggtggccttgttatccatatggtaaaggccctactagcgcctatttatggatttatggatactattccagttctagtctttggtggagataaatctaatctagattttttatatgcaaagaatgcagttacgaatgtattagatactggtatgcctgtcatgtttaaatttgttgctttttgtgtcctcgtcagtgtagtgattacagcagcaaaatattcagcaacgactatgaatccaaataatcgcacggcattaattgaatatgcaaaagacttaatgattatctcgatttgcctctggcatttagatttcttttataattttgtatttgatctaaattcttggattacattggaatttaaagaggcgataaatggagtaaataacgggaatttcaacccggatcaacaaatacctttattaaagtctggactgtctgacaataagacgattacagaactttcaatggaaggccataaaaatgattatatgtttatcatattcggactatttattgaagctggattaatgatatgggcaaacttttattatttaatgcgtgctgtgacactatacgtattaatgttactaggccctgtaatggtaggaatgtggttgttcccgcaaaagaaacaacagacgttatattggattcgtgagtttatgggagcagtattaattcaagcgattcacgcaattaccctatggttagtcattacacttattggaggtgcacaaaatcctatcataaaattagtattgcttgccatgtttatcccagttggtgaaattgtgaaaagttttattggccttagcaccaatgcatccgctggtattcatagagcgggtacgatgatgggtatgggtgctttagcaagtgtggctggtttggttaaaggtgttcgtgacgactaccgtagtgcaaaagataaagggaaagaaaagaaagatggagagaaagataataaagaagatgcggataacccgaaaaatgcattaggagcaaatttagggacagatgttggtacaacatctcgtgcagctcgtatgttaaaagcaggtcaaattggaagttcaattggtaaagcagcgacaggacttgcaggtatggcagcgggagctggtcttggaccgggagcgatggtagcaggctcgcaagttggaagtgcattaggtagtgctcctggtgcagtggctggtagaagtgttgctgcagtcggcgaaggggctgtagccttaggaaaacatattggttcgagtataaagaagggtgcggacacgtattcaaatctaaatggcgaatcgtatccggaactaaccgatgaagatatcgcacaggatttagctacaaaagattttgaaaattggaaagcggataatcctgattctgcagttgcgagtcgcttaaaacaagcattccctggtgcgtccgatgcagagattgctaaaaaagtagcgaaaacaaatggtgatcaaatgtctcgtttctcaaatcagcggaaacaagatttacaaaatataaagaaaaccgctacaccatatggaaatgctagagatttagttaacgctgcaacgaatgcattccaaaaggggtatgaggcagaccataaagatacgtttatgagtcagttaccagaaaatatgtcagcggaagagaaagagaaacattggaacgaccatttgaacacaaaagtacaaggatttagaaaccacgcagaacaggcggcaacaaaagcaggagccatgccagttgatgcgaaggacaaacaaggaaacaatctgtttgataagtcctatgtgaataaagatgcgtttgcttctcggcttgcattaggaaaagtcggaaaagcagtcgaggatgtaaaaggagaaacgttagaaagtggccatcaaaatatgggacaagtcggtgctcttgtcggtgcttctactgctgcatttaagaaagcatatagtgcagaccataaggcgggattcatgaaacaattccctgcagatatgccgcagcaagaaaaagaagccgcatggaataaacatttaggtcaaaaagtacaaggatttcaaaatcatgcacaacaagcggcggaatcagctggtattgtacagcaaaaagatggtacaaactatgcgaataaagaagctttcgcttctcatttatcacaacagttacaaaaagatcctgacttaaatgcgatgggtatatccagtgcggcaggcattcagcaggcagtcaacggtgtgaaaacgcacggtttgacaaatggaacaggaggtcagcaagcaaaacaagtaagtaatgttgggaacctggtacaagcttctacagaatcctttaaacaaggatatgcagctgagaacaaggcaagctttatgaaaaacttgtctccaactatgtatccaaagcaaaaattagaagcgtggcagtcacacctgaatgaaaaaggaaatgaatttaaagcagtcgcacaacaagcggcagtacaagcaggagcgatgcccgtacaggcaaaagatacgagtggtaagagtctacataatcaatcgtatattaataaagatgcctttgcttcgcaattaacgaaaggattacaaagccatgcaagtcttggaacggtgagtcaacaagtaggttctggaattactagtgcgattcaaggtgttcgttcacatggcgttgcaacaagtagcgcaatcaataaagcagtatatgcagcgacacgaacgcaagccagtatcgcacgtgcaggagatctttccgttgcggaaattgaacgctcttatgcagatgcatcaacaagtgtagcaaatattgcacaaagtgctggtaaaatgtctatcccaacatctgcagtgggacgtatgacacagcagagtacaaaacttggcatgagtgtaatggaaggtgcgaaacaccttatgcttgcggatcgcattgatacggtatcaaatgcatactttagtgccgcgagtgctgttcaacaatccggagggaatgcagtacaaagagtgataagtgggactactgctgctgttaatacatcattaggtgggaatgcagcagagcgccactataatgtgacaaaaggcttaagttacgccgcaggtgtgattggtggtgcgggtgcttatcaagcaactgcacgtatggtaagtaaacataatccgtataacagtgcagttcgtacagaagcaaaagagattcaggagattcagagaatggtaccaacaacaacagatcatacaggcgcgcaatcggttgtaaaaggtgcagtacgtcttgtgacgacaaataataaatcatggattgaagcaaaagacgctagtggaatgaagcaagttgtatctcgttatggtagtggagatagtaatatacgctctggacaagtggtatatcaggatttaaatatttcagacggacaattaacgcagtatcgtaatggtacgaaagcatctccagcctatatacaagattcaagtggtggcaaaatcaatattaatcgctcaatcaatgtaaatccaaatcaattagtaggaaaccaaaatcaaagacctttacaacagaaaccggtatttaatgaaccaccacttacagtcaatcacaaggtagacaatggtcacttctatatgtctgatttagaccaaggtggctataagaatgtacaaatggtggtagaaagagatcgtagttacatggttgcgacaacaacagacggtacagtgtcacgtatttcgccattcggaaaaggagatacgcgtttacaagcaaaccaaaggattgaaagagcttgtgaagtgaaagacagtagtattaaaccaagagaagaaatcttagtaacacaaacacaggacgaagtagtccgtacagagacgcatttgaatttatcagaacatgacccacaaaatctgattccatttgcgccaaaccctcggccatttgataggtctcataacccttttgatgaagtttatggggtgagctgcttgagggaaaacctcacgagcagttcttatggggagaggctggaaacggatcacaactgataccgcgccagtcttttacccgacaaatcttatttaaaacgtggaagtcattctttcaaattcatcattgtaaaaagataaaatcagaacgattggagtgccatttatatggtcaattgattgccattctactctgttcttctatcatgtttcaaatgtgccaattgctcctcataaagaaaaaacgagagcttagtgagtataaagccatatatatgattaaagattactttcttcttctattccaaactatacaaaaaaacacccaagagctatcaaaggtgttacttcgcctgttcaatctcctacagcaaaacgggcggaaatctcatcgatatgagaaaaaaacggtctttgatatattaggtatcgtttacaattgtaccatgtctgataatcaagccgcttaattcaaaaaagtgaaacccgttagggtttatttcgtatgcaaatctttcaatcacctacacttgccctttagaaaaaagaaacaatctcgtctaaaattgactttgcataagcttagcttgatagcgatggggtctcaccaacaaaacgcgaatttcgtacgctaagcaatttcgacaaagaaaaagccgatttcctgtacgttaagggaccggctgtattgttggtttggaataaggttcgatcaaaattatgctgtgaacattgattttataatagaaaaaacccacgcgttttgaacaaaaattaatcaaaatacatgggtttgattttgctatggagtcggcgattcatattccctcctgatggtgtgccaagttctaaactatttctggttattctagaacttacgcttttactcttccgtattaaattttgcctgcgctctattgaataatgaagcattcaccttatttcgcgataattcacgaaataaatacttacacctactaataacagccctacgacaaggcggtaagttaccggttcatctaaaaacaccgtaccaatgaatactgcaatgatcggtacaagaaacgtgaatgtaccgactttgcttgcctctcccgcattaataagtttatagtaaatgatatatgccagtggaatgccaaaagtggagccatatccgagtccaaaaaggtatttaccattccattcaatagctgaccagttttcaaaaattgttccagtacctattagaatagctccaccaataatacactgcaaagacaccatccagaaagcatctacttcgttgctcactttcttcacataaaccacaccaagtgcccagctaaatgccataagcaaccctaaaacaacaccaatgatcgatacatgaacggttaatccgtccacactgacaactacaattccaagaaatccgataatcaaacccataattttaaacggcgacatgtactctccaagccaaatccaagcaaacaatccaagtagcactggctgaaaatagacaagcactgaaaacagtcctcctggcaaataaatgagccctactgtctgtaacccaaaaaagagaatcgtattaaagaatgctgaaatacaatatttcgaccaattttcacgccatttgatcctgttccgcattttatatatgaaagctgctagtataaggcccccaatcactgcacgcatacctgcaaataataacgggggcgtataaggcacagccattttatagattggccaacttccaccccaaagaaagattaacaatagtaatgcacacgtcgattttgtaaagactttccccaattgtatatcctcccttcaatagttgaatagtaaactaagtctatatttcgaattaggcttgaacgctcctccaccaatagattctagcctatgttaagggaagatatctgcacccttttatttatccttatccatatcgaaaaaattatcttacctcagaacccctatttgtccattctccaacaaattcagcctcattataagaatagaagtttttcagaatctcctcacgattatcagagaacagctggtctgccacagctgaaactagtctaggtatcccatatctcattcccggaagcgaagaggctgagataccacagctaactacagctgaatagttaaaagcaaaaagtccatgaagaagctttgtatcctttttgtcccggcatgtgaaagtaaagccagggccaaggtaaggatatgcatcaagcttacggttggcgatatcagcaggtgcattataatagtcgtcccaacgtgcaatatggcgttcgaaaagctttagctctggacgtaaagaatgatcagtcacaagaccagtggaaatgattagaaaatcaaaagtaaaattaccttgtggagtagtgacaacagccttctcagcttcatgctgtacctcaagccatggtgcacctcaagccatggtgcacctaagtgtaatttaaagccgggatgtgaaactgcacgttcaaatgtgtcatttgtagggggttgatgcttaaagtaatgggccataacggaatatttatcagcatcagatagaacattaaaacgttcaattagacctgacacccccatttgtcgcattgggttaatgcgtggcatctccgtgcggcgaacaaacacatgagctgaacccacaccttcagataatgcaaaattggcattatcaaaagctgaggccccaccgcctaaaattgccaccttcttgtctttaagggcctcaaagtcaatgtcttctgaggtgtgtgcatagaggtgacgaggtaatgtttcggaaatcatagatggtacgtgccattcccctccaccttgaataccagtggctaagataaccttgcgggccagtaatgtattagaagatgctcctgctccttcaatatgcagtcgataaacatcttcccctgcaggctcaataagcttcatctttacctcattaaaaacaggtaaattaagaacctttcgataccaacgtagatagttcatccaatcgttccgtggaatcttatcgatgtcctcccaactttttggtccaaattgcgcttcccaccaggagcgaaaagtcagagaaggcactccaagatcaatggatatcaaatgtttaggcgtacgcaatgtcatcatacgagcgtaagttacccatggcccttcatatccttcaacgttttcgtcgatgataaggatattagatattctttcacgcaaaagtccaaaggccacacctaagccacactggccgcctcctataataactgtatcgtagacatgcccctcaggatggtgggttgggcatacccaatcctctcccccaaatgcaagataagaaagatccctttttacttgttcatttaaagcttccaaactcataatttttcattcctttcaatatatgacttattaacttctgaactaatcgttaagttattctttactttatctgaatggcggctttttcttataccgtcttatgagcagcattgatcgatttcaacaattttattaagattttctgaaatcatcgaaatttcctcacctccataatttcacaatactatacccctctatggtatgtaaaggacttttaataaaaagtttaaaaataggtgtttgacgaagaatttttttacttagaatttcccctttactgaagtgcatccttctattgtgggggtaccaccacatgtccatcaagctaagaaaaaattaatacccctaaaacaaaaaaagactgaattcagtcttttaaatctggcataccgcctacattttaacgaaaatatacgctaagcaaatttgaataagaaaagagccggactttccccgttaagggtaaattggctctttaatctttaaaggacgtaaggaatgtgcactccctcaaacttatattctcctaagaaatctaaattttagagaatattcacagctgtaattttgcaagttgaaatagcaaacctaacgattgtatttggacttataggtaaagtacctagcactataccaagacctgtttgttccacattaaaatctgctgcagtagaaccagtatttgctaaaagattcactgtagaaccaataagcgtatctagtaattccctaattggtcgttcacgacaatcacattcgcatcctaaatctacaggtggaagtaatgttatagatggtcctggcggtaaaaaacctacccctgttacatcagaaatattgaccacaaaggatgtggtaccatctgtaactgtaactaaaaaatcacttacggaagtaatagtaaataaaaagaaaagaggggggacgtttggcgcgtctgcaatagtgccaagaagcacagtttctccaataagttgttgtaaaacattctgcattggtaaaacacagcaatcacacagacaaccttcagtctctcctgttgctccggtaactccagtaggtccagtatccccggtaggtccagtatccccggtaggtccagtaactccggtaggtccagtatccccggtaggtccagtatcccccgtaggtccagttgctccggtaggtccagtatctccggtaggtccagtatctccggtaggtccagtatctccggtaggtccagtatctccggtaggtccagtaactccggtaggtccagttgctccggtaggtccagtatctccggtaggtccaggatctccggtaggtccagttgctccggtaggtccagttgctccggtatctccggtaggtccagtaactcccgtaggaccagtaactcccgtaggaccagtatccccggtaggtccagttactcccgtaggacctgttggtaatgtaaatggtggaatcggtgataaggtaggtcctacaaggctaggatcaaatgctccagcagataaaaaatcatatgaatctaaccattttgaatacttttcacttttatttgacatgtatcctccccctccttaaaaatctattcatcatatagctagtacatgctatcgataataagcttagatatatctattaagttttgctgagagtatacatatgttactaatacaattgtatttagaataacagataaaagatgtcaccatatatgtccatcaatctaacattatgaattgaacccaaagcgataattttatcttttcataggtgctcatgggaatttagtccattttttcgtttttggagggtgattgatttcttaagttgatgggcatggggtaccaccccacatccatcaacttaaggatttagactatttatgaggtaaaaacacgttactattttcttgttttaacgagaaagggtaccgtggttgttatgaatatgttgtaaagtttttacgatgcgttacattctataacatacgctttaaaatctttaatacgttaaacaaggactataattatagaaattttactataacgtttttatgttttttataaaataaaaaataggtgaatagtaatccctgtttgggtgtacatccacctattttttcaatttaattagcatgacctagtatttgtatgattttatcagctttggagttttgaatatgatagtaaatctctaacccttttctttcagctttcagtgctttccctttcattttggataaatgttgcgatactgttgattgtggaatatccaaaatattagttaattgtgttacatttaatttcttgctcttagccaattcactaacaatttgtagacgtattggatgagccataacttttaatagttcaacgttttcttcagaaactaaacctggtatattatcattattaaatttgttcataatacaacctcgcattcaatttatattttattataatcaataaatgtatattcttaatattattatattaaaattattagtttgttttactataaattaattatataattttaacttgtgcgatgagtggagctaaaatgtgtttgtcgtgaagttttttaaatgtttttagtaattaaaaaaacacaaagaaattttatcactttgaattaatgcagtataaaaatactaatgtcatcaatatacccatttatactatagataaactagcttaggatatcaaaggtaattattccctgaataaaattcattacatttaaggggtagcaccaattttacaaagtatccactttggtgtctccgtttaaaaaagtacccattctcttgtctcgatatgcggacagaaaaatgggtactaaatgaactttttctatagataattcaggattttacactataaaattagttcctactttcatgtctttgtacataaaaggacatgaatgaccataccctgtagatttaacatagttatactgaatcgtcatagtcttagaatctccaataatttgagattttgtcgtttagtccccatatctccttgctcctaacctgtataattgtattattatcttttaaattaagcattaattctattggtgttagtgttactgattcattagctccaataatatgtagtattgttttttgtgtagttgtttttccaacaactacgggtttgaacccttcttcggttttcaaatacctactgtcgccttcttcctaatttggcttcgaagattcacatcgaatacttctagcctcttcaaagttgcgtttgattttataaacgcctgtggttcaccatttgcgtctagatggcccgctaaaatgacatctatggtgtctttctatgaactgctgtaacaattcctttcaagccttcttctgtttctacaagtaacccagggaaacttgtttccatagttaatgcatctgcgtcattaatagaatatttaatgtgggggaaaagattttttgatacttgctcaacgaatgctttctttgcattcgcaagcatttctccctttgtatctcctgttacaacaaaagtagttggtgttaatgataaagttactgacttcaaaataattacccttgttttatagtagtttttaatggtatttctattgtcaactgctcgttaaatttctatttaacgaatagttttaagctcgcgagttaaactacacttgctattttagaaaatagtaaaaatcctgaaagtgggcggtctaaaaatttgctaaatcatataaaacatttaaattatgtaagtattatttttttatgctatacttttattgagtctttaattaactgaattttctgtatttatttgagaaatggtatatgatggatttagtcttatctaatttctgttatgatatttattaagatataacatatagatgggatgaggaggatactatgaacgtttcagttaaggggaacgagaagattacacaacttttaaatgaatggtatatagaaatccgtgcaagaaggattggtcaagcgcataggttaaaggaagagattgataagaagattaataacataacagaagatcaaaacctactattatattattcccttctagacttccgcttccaatacattgtagataatttaggtgtctctgcaagtagctttgataaggttgaagcgtttgagattccaacaaacaactttttaacttattactaccatttctttaaagctattcatgcttctggtattggtaactacacaattgcaaaagagcattttgacaaggctgaatctcttctcgaattagtcccagatgagattgaaaaagctgagttttactacaaattaggtgctttccattatgacatatacgaagcacttaactcggttaaatatactgcaaaggcaaaagagatttttgagaaacatgaaagttacgaacgaaacgttggattctgcgagaaccttcttggaactgcgtgtacaaagctaagagaatgggctttatcagaagaacatcttattaaagctatggatattttcaagaagcttgatgaagaaaagtatgccctaatggttagacataacttaggatatatgtattctagtcagaacttatctccattagcaatcagatatttatcagaagtgactacttataatcctagacaccataaagctttattcctgcaagctagagagcattacaagttagatgaacttgatattgcaaaagatttagctgataaagggtatagtatttgtgttgaattaggaaatagcgaatataaacacctatttgctattttaaaatgtcttatctccaatgtctctggagaggatttggaaaagactgcacttgaaggaatatcttactttgaaggcgaatcactatatgaatacatagaagaaagccaagagtatctggctattaaattctatgaagaaggaagccacattaaatcaagtgaatacttctatctagcctcgaagacacgacaaaaaatcaaagaaagggagtccttaaaatgaaaaaactagtattaggattaatgggtgttttaacggccttaactttgacaacaggcatttcctctgacaagggtaacaatgaatctgtgacacctgttattatgatgatggaacatggagatcatggtggttgaaaactaatgtacacaaaataaatactaacttaaagggaagaaatcactcttccctttttatattgtttgaatttttatatgctatcatttctttttagtaaaaaataattaaattaatatattttaataattcgttataattatatataatttttcagtaaggtcactcatttttaattccttcacagatccatctatgtaaatacctactggtatgtaatttttttccttgattccaattgcaattctaaacaatactgtctgatttgataatagatccatcatcatgtaataatcacctccaatactacttgatattgcacattatattaattgtcatgtgatattttaatggtaattttttccttttattaaaaaattaatttcagtttattaaagaatgtcttttttttataaaaagtttcatgtaatgtcttgagttcaaaacaaccaaatactgtttcatctattaaagaaattacaatttccaccaactcttggtatccttgatttttataaatcgttaccttgccatcatacatattgcataaatctggtgaatttgccacaaaatacgtcctacatgtaaatggtctatcatcatatacagtgcattttttattttctacatccagcatagggcatggttcagcatatttcgctctactactatttttattaatttgagacataggaatttttcttctctttttcgtttcttgatgattcttattaatatttttctctatatcttttgtaagcttatttcttatcttactttcctcaattgttgctaaattaattggttgaaaacagcaggctatacatccttttctacaaggagcatttttttgcagttgcttaaatacttcatcaagtgatttaaataaatcacctattaattctagacctttctcttcgctaattctaatgttctcttttaaatacaatactatatctagcatggtatttaataaccctttcttcaactctatattttcatatagggttttaccgtcatgaaacataccatcaacttttcgccactttatctgcgaattcatatgacacttcttatattttaaccctgatccgcaaggacattcatcattacgcgtagggttatataagtcttcatattcaaatatcaggtccctttttatggtttgtattaaccaatccatattttttctatattccatcatatgtacctccaattgtttttttatatacatttatttattaatcaattatactctttctctttttaaggttacatattttccctattaaaatttaattttattagctactcatttcttaaaagatatctatggaaacatcatgctatatttagctttacgaggaaggagttttcgatttgtctaatataattaatagttataaaaaagaactaagttcaatttcagactcgctagtacctagtcaattgctagattccaaatatgaagtatatattaataatcttataacagaagcagaaaaagaaggaaaagattctagtgtccattttaatgatttagatatgatttatcattttattcatcttaaagagactaaaaatttcttattcaaaaatcattaaatcttaatatttttatttataaatcaaaaaaatattttcctgttttttctatttttaaaaagtatccactttggtgtctctgtttaaaaaagtacccattctcttgtctcaatatgcggacaagaaaatgggtactaaatgaactccccccgttgataattcagcattttaaactatgaaataagttactactttcatgtctttttacacctatcttagaaagtgtacaaggacatattaactagacttataatgtatattttgaggaaaaggactctttaaattaattaagagtcctttttgttatttaggagtgaaatttgagttgaaatgtattcattcattttagattggtgatatttaatccactcttcagttgtcatattagaatttttagcaaacttttttgcatatttatatacagttctatttgtttctttaaagccgtataggttaatgccaccggtggtttcaccgataaaattaaactctttgtgttcaccaggataaaaattaaaagcgacttgatggatagtagtgtcaattacgtaatcttcaaagagaatataagaatgaagtccgaaggctccgttttgatacatgtttttaaggatatgttgatcatggaattcatgatgataatagccttgcataaaggataatctattcttagatatttcattggattccaataacaaatagtaaagtaaaacacttgcgtaaatacataaaccaccgttttggttgtattttaaaacttctttccaagctgtatcaccttttttaagaaaagaggatactaggttgtgatcttcatataaagcagcgtgagttaattttgttagataaagaattggttttatagtttgtgaggtaaagagatgccctggtgcttgttgactttgatagtgaataggtttctgtttttggtaatcataacttgtaagccattcttttttaaatacggaagaaatgtttttaatagctacattatgagggttttgagtgttgtttattttcaaggatatatcattcatgagaatcctcctttttcacatgatttcacatgtaatattggtagtgttttataagatgatatttatattataagagaaatattgagcttttcatagatagtgcctatatttataatggatttgaatactagcattattaacagatgccaataattcatacatgagaatttgagttatacaaaaaaagtcgaggctcttttaggctattcattgtaatatttcaatatcaaaaaacacataataattcagctatattctagaaaaaataagaaccctcctaattgtaggagggttcttacctttcatataagtgaatccgattttatgatttgaaaaatgaatgttgtctgttatacccctataacgctgactgttcagagcatgctctgacgttattattatactaatgtatataacggaaatcaatactataataataggtatatttaccctactctttttcgtttttacgaccttaatatcataaaaataatatctaaaaatatatagttttatagttttaaatattatatacttatacaagtaatttagctctttttacgagttgaaattaatttatataagacctgcggtagtatgtcaactgaaaaacaaaagaatttttagttatcaaaggtttttatagaaaaaatccttagcgtggtttttttccgaaatgctggcggtacccctttcttaaacttctgttcccaacatacaaataggcttttgtctcataaggctcatgtttaaaatacgagtaactacccttaaaaatcgttagttggcgcttctcagtctgcaacaacacccaatacttactttcatccaacacaacacctgatacattcttaccactaggaaaataaaccgtaatagtatcctctacagaaaatacatactccgtaggctttttataatcagctagtttcatttccttcgtatagaaatcatttgtcataagtaatggatcatgcttcacatgtgtaacataagataaagcacccttcatgattgtatagtaattctctttttcagttttaacataaagataataggcatcttcagacaataaagtccctttgatccccttaccatctttaaatacacaacctatcagttcaccaatctcaaatacaaaggatgttttcttcttcccctcgctaaacttaggagatctttcttcaacagttggaaactcttcatgccttatatatttaacttcagagaaattaactgttacttgatacagagcaccgttcccctccacatcaagaacacaataatactcttctattgttgaaattttaccttttaacaaatcatcatgatttagtagctttatatctacagtagcccccctcataaatacaaaagagtgtctgtaacgccctctactatcacgatctataggataatttttacccaaagtaagcaccaccaatattataattttctagtaaacctctataaatttcacataccataatgagtagttaaccctagtagtataagactaatctccaagaataaaagaaacataaactatgtaaggccataacgctatagctagctgaccgaaccgtgtatcgtagatataattatgtattggcagagtggacaattaaaaattaaccggctggtagcccttctaatatgccgtatagtgtttcttcttccgccatagcgttacttgtttttgcttgtccaagaacattacccatttgagggaatagcccttgtaaatagtttaaatagctctctcttctttttccgttttcctttaaagcaaatgcaattagcattccttgtgtagatagtcctgtttttgctgttttgccttttccctcaaccgttttatagatttttgtactcctttttagaaccgtgtttaatgtactacgtggaatgttaagcgcttcgcacagttctgattgtgtaaagtatagcacaggtttattatttgaattcatcgataagaaagtaataatgtcagcttcccactcgtgccaatgactacgcacacgatccttacgttgtttcttatgtttcttccaaagtacagaaggcgcacggaaagctgaagcctgtccacccaccccatatgtttgtaataaacgctctatgtaatctttatgtgctgcctgatactttccagagtacgcagacataacaattcctctaacttcagtatgatctagcggttgctctaggttactattaaactgatccattaagtccattgtgtctttaataacgtactgactttggaaacacgctaaagaaagggtgaaaatcgcattgtttcgccctgctttcgtttgttttggagatacatttgtacaactaatcacctgtttgaaccatagttcatccatttgttttggttgctctacaggagcgtttttagcaaaaggactctctatcacattatgaaactgttcatttcccttgttgtcgtcttgtcgcttgctccactcttgtaactccttgaatgtatacacattttcctcaaagaacatcacaacattttgtactgaaggcattctgaagaacccaaagtgattgcatgttaaatccacgtttgacaaactctcagcaaacatttctcgtaggttttgagagatacgtttcgctgatttaatagctataaagttcttgttatttgatacgtacacagctttatccaacacataatacacttgatagccctttgttgtttcaagaatcatagtaggtacaccaaaacctgcatttaatgccacatcattaatcgcagtcatagggaatgactttgaatcaatatcaataacaaaacagttaatttgttgtaggttcttttcagtatgccccacaattgtacgaagaccattttcaccatatgtaccaaaattatatacattaggtgtccagtgtgaagcctgtccaacatgatccagtacagcttcttcagatgataatactacgcccctagttccaaacttggcgcttaaatcttctttcttacgagtaataaaaactgaaccttttttattcttcttgccatttaacactttgctttcaaatttctcttgtgttgcaatagatactaatccagctttcgaatttttagatttatattttcgtaaccctttatgtagtattaattcgatagcgctttgtactgtattcatgttgaacctcctttccactgattttttacaacaaaaaaggtgagcagttatatcactgctcaccttaataaatagacttcccaagattgcatacaaaggcagaaaaatccatacttaaacatgcttaaaaatgcacttaaagaagggtttctatctttacaaatctactctaattaactatactaagaagagatattttatatctcaatagcatagttaattagaacggtttgggaagtttactcactggtagtcgcagtgacgtaaatggaatacaagatgttgtcagcaaattgtattcaccaagaagtagaaatgttgtcagcaaatctacttcccctgtctggtttgagacctcagaaatctcgaactaaacagccgttctttttttatttgtttttttctgttttatgtgtcttatatattctacaaattcttacgaatttcttatgtatattatcaaactaaatcgtattgtgttgagaaacttgttgtctattacgttacaacaagtttttttatttgtaaatatcgaaaaaagatacatattaaatatacacccctaaaagaagaaaagatacatgtatctttgtatctttgtatccttgtatctttgtatccttgtatctttgtatccttgtatctttgtatcctcttaatcttgtattcttgaatgacttataaaatgttgatttaacagcatttattatagaattatcttttggtttcccataaaaaaatagtaaaatataaaaaaggatacatttatccttttcatgttattgctcatatgttatgattgatttaggatacaaagatacatgtatcttttgttacaattgtgttacatttaaaaaggagtgaatctctatgaaaaaaggacacgtaataattaacgcccaacaaaaagggggcgtaggaaaaactactgactcttgtatggaatctcttgtagcttctctagtatttaataagaaagttttattcattgatacagaccttcagggaaacgggactacattcttagcaaaatcctttaaaatagaagaaatgcaaaaaacattaatgaaatgtttagaagatggtaatctatcagatggtattataaaacttcatgaaaaccttgatatgattccatgcggttacgatatgagaaagtacacagattttttaattgaaaactttaagactactaaagatagaactttttattttgcaaagttgctagataaaattaaatacgactatgactacatattcattgatattccaccttccactgacctgaaagtggataatgctatggtagcaagcgactttgttatagtagtgcaagagacgcaacaattttcttatgagggaagtcaaaggttaatctttgattatctacaaaccttagttgatgactttggacaccttgtaaaaatgaacgtagttggaattttacctgtattattgcagaagaagcgttcattgcacaacgagattgttaaaaataccattgatacttttggtgaagaaaatgtcttcagtacaataataaataatcatgctcgcctagaatggtatccacgtattggtttccaattcgaagatcaccacgataagagaatgttagctctattctgcgacattttctgcgaacttgaagaaagaattcatctatttgaaactaaaggtgatattgtagattataaatatactcctaaatatttcgtagataacaaacttactaagttagggaaaggaattgatataggtgagtttactaaagagagagcaacccaaagatcctaagattactgaagctgcggatgtgacaagagaagtagaagaacatacaccctcttctcaaacaatagcggaggcaacaaaccaacaaaaaaaacaagtcggttcgcaaaatcgtaaaaatataaaagtttctcctgatacatttagcctgattgaaaatatctgtactttaagaagcttaaaaaaatatgaagtaatagatgaactactcgcaaactttataaaaaacgaattgactgaaagagaacagaagctacttcaaactcttagttctaaagaggatatatagagatacgcattatgccgtatctttttattttaggatacatgtatctttgtatctttgtatctttgtatctttgtatctttgtatctttgtatcctaaaaatttaaattacaaaggaggtttctcatgagaacccttactattattgccttagttgtcatatgcttagtattttttaacgtaatttctatacatacaatcgggacattagctgccataatcggagtcataatagcaattatacttggtgcttatttcttatatcggtttgctcttggatttcttgctctatttacaactttcataggtgttattttagtgatctgcttaattacatatgctgcaactcatttaatttaaaaggagaagtgaatcatgaatgcactaaaagaaaataaaaaacaagtttctttctttgaaacatttttcaaaaatcacccaatcaagaatgatgtatttgttatagaagcaaatgaaaaatacttcttttttgaatacgacactgtcattagtatgattaataactttagtcaaaaagaacaagattatataagaaggcaactgcaactgtacaattacctaagacaagatttatcaatttgtttaatgcaaattgcaactgattatgttagaagacttataggagaacataaaaaaacagagtgcagaatcctacctctacactccatttataatcacagctaaagaatatgaaacttctttaatgcaatataccttactagaattatactatatccctacagtacttgtaactaaaatggagtccttaatcggaatccatttttttctattaaacctttttattctatgagtttattaaaaaagaaacatggagtcctacttaaaactctaatttttcacctgttttcaaattatctatataacccaaacgtaaactatgaaacttatctaaactttccatagcccctgcaaattctagaatacacggaatttccttctttgattgaaaagaaattactttcgcctgtggtattttatgatcggtttgtaacttcttcaccccaacacctaattcttgatataaaattctattgatattactaagtacatcttctgatccatgtatacgcaatctaggtcttatataactccgattcttccttttctccgttagtaccattaaatcatgcgataattttatgtatgtggaaacaaatactttttcattaaattcaccttgtggaaaaattcgattcttctcttgaatggaagtccagcccatctctagaatcatcttatagaaaggatgtctaaggttaattagtgtgtgccaaaaatctattttatcttcctttttcctagaaaaatgactgactgaattacttccaacaatcaattcacaaaaacgaatgggtacatcctttcttttatttcttatagaaaagtaagttgctcttttgcatccatacctccaagaaattgctaaagcttcagcaaattgatctgattttataaactcctgaaattctagttcttcttcttctgttaatctaaatctcctatccataattctattaccatccctaacttcatctactacatacacaaactggaatattcatttcagtcctctatcaaaaagagtttttatcagccttttttagagcagattttatttattatccaactcaacccacttataattaaattctccaccaaaatcattcgtgacaatgccttttacagaagaacgttgtaagtatgatctacctagttggtagaaaggtgcgaccgctccatcttctattaatattttttcagcctgcttcatcgcttcccaacgagctttctcattaccagctaaattcgttttcacttcatgaattagatcatcatattgtttatttgagtacttatcaaagttataggtactgtccgtcgtaaataaatctaaaaatgtaattggatcaggaatatcaggagaccatacatcaacccctaattcgtaatcactatttagaagtaattgaatttgttgtttacgtggctgcggcttaacgttgaccgttaacccttctaaattcttttctaactcaccttttaaatactccgcattcttcttggctaaatcattatcacttgttaataattctaatgttacttgctctttcccaagttcttgctttgccttcttccagttctcctctgctgccttcacatcgtcttttactaacgttccattttcttttcggaagtcttgcccgtctgttcctttagcgaaattaactggtataaaaccatccgcagggagtgaaccattgtttaacactgtatctacaaaggctttcttattcattgcctgacttatagccaagcgagcatttttattttttaatacttcgttcttttgattcatacgtaaaaactggacagtaacttcagagcgttccttgaagtcaggattctttctatatttatctacaaattcacctgttagtcctacacggtcaatttgacctgattcatataaatttatttctgttgatttatcttttacaatatcaaagttgatttcgtctaacttaactgttttagcatcccaataattcggattcttctttaactgaaaaccttgttcatgcttccaattatctaacgtaaatgctccattataaactaattgatctgcttctaaaccatactgcttcccttttgattcaaaatacttctcattaatcggtaagaacgttgcgaacgttgtcaaatctataaagtagggaacaggctgttctaattgtatttctaatgttttatcatctattgcttttacccctagctgatctataggtaactctttactattaattttctttgcattctttatatcaaagaataaaaacgcatattctgccgctgtatcagggttcacagctcttttccaagaaaacacgaagtcttcagctgttacaggtgttccatttgaccattttgaatccctcaaatggaatgtgtatgtttttttatcttcactcacatcgtacgattttgctactgctggtattgccgtatttccttcccctaatgtatataaaccttcaaatacgtttttcattacattcatagaatcaccgtcagttgccttgctgacatccatcgttgggatttccgccatatacggtaaatgaatggattgtgtttttgaatctttatcatttgcatttgctgtattttctttcttttcactactacacgctgtgagtaaaaagctagctcctaaaacagcagccataataggcattactttttttaacatgtttattttctccctctctacgtacggttcatagcattagattatctagttgtatatcgcctagaagaagcaaactttgcccccaagtaataaacctcgtaaatctttcgccagtataaaacgtagcacccaaagatgggcatgtcaattggacaaattataaattttaatatttaaatcataaattataaagatatttactataaattgttgtgtaatgatatctttaagccctcttctgaaaaacggatctttattttcgtttttaacggtacatacaactgaaattaatacaattacactaaagttactaaaaatcacacatacggattcatagaacccttaaacgaaatcctgtgaaaatcatttcaaattctaacttccatcctctttttaggtcttggattacatatatctatctttacggtatgtgaaattatttatctaacgaaaaataacacaataatagtcccactataagaactattattgcgttattaaaatatttaattacaattcaatgattcaaattgtgatagaaagcatatttaaaaaggaatcccaacttaatatatattcttcattatcaaattatcactcttataaatttagaatacctatacattttttacaaatattgttatactaaaaggaatcaaatcattaccccattaacaaggggactccataattggagtccccttgttaattagcaatcaaaaatgatcagcatgtgagtattgtataatctcttccttttttaaagcatgttgtgtatcacctgtattgttactaaatgataatgctataactaatcctaatatcgctaacacaagcttcttcattattttaacgcccctttgcttagtaatttttgtttcgcttcgtaacatgcatcgaaataatcactaactttttcatgctcattcaatttgcggaagcgaaccgctaatacttctgcatattcctctacaaaatcccataaaccctgtttttcgaagtacggaatacttttattcacttcttcttctaatagtttaattgcttcatcttcattaagagaacgtaaaatattgaaatgatatacatactcttcatttcctaattccatacaaactgctaatcctttttcaataagttcttgtgcaacatttgtttctcttagcttatagtgttcacgtgcttgtaagaataatgctttaaagtgtgtaggaatcttctctgttacttctgataaatgacgaatcgctaatgtagataagttttgagttgcatataataatcctagattatgtcttactactaaaatcaatttttcttcattatgtttttgcaacaggtcaatagaacgattcagatgttcttccgctttttcaaattgttttaagaatatacaagctgtccctagtgtgttttcgcaagaagcaactttcacctcatatccagcatgcttttcaaaaatttctttcgctttatttgcgtattcaatagatattagcatactagacatatgatgatttaacaccgcatatttttgattaaactctgcatgctctaattcatcggaaatatgctctaataagctttcagcttcttcatattgtcttcttgcttcattgtaattactaaacatcaaagcatgttctgctttaaaagaatgataataataagctatgagtttatctgtcgttttattgattgtatcaattgcttcaaaactatcttttcgaatacttactcgatcagttagcattctgtatttaaagtctagtaaagaataatataataataagttttgattttgtttttctttttcttctgtatgtttaatctgttctattttttcatctatttcttttttcacttcagctgcttttataatttgctgcgacaacatcatttgataaaaatcattaagttgttgcataactgcttcatgcgtgaaaagatttgtgctcatatcactacgtcctcctcaaccactttcatttacctaaatattaacataattctgcaaattacataagagtttgacttgtaattataagtttctaaaaaaaattcagaattttaaaatcacaattacacttcagtataagtgctcatttccaaaacatccaccaagatttcttttttactgccgctatttcttcccgggctaatacaatagtacgttttgcatcttgaatctctcttaccatcttcataaggttatcatctcttatctctaaccttttttctatcctttcttcacgttccttccgatctttcatatcttctcttaataatttatttcttcctttaatatcctctgcaattaacttattcctttgatctatacgattccctagtctattttccatttctaaaaggttagcttgctgcaccttattgatttcttttatcatagcgctatattgttgttgaaattgatactgcatttgataaggaactggatctgcaccttgggactcctctttcttattatcgattccaaactgcttcgcaatcattttcgcagccttctctaaagtcatgccctcttgcttactcaactctactaactgttcaataactacaacatcaaactcagtatattcccttcttcctctactattctttcttacatcatatccttctcgttcaagaacatccgaatactttctaagagtgctgctacttacttctaaccgactatagacctcattgctggtatatactatctccgcttctgacatagcgctatgccacctcctataatgaaaattccatattaaaggaataatcccttttagaatccatcgacgaagctcgcacggtctttgctatgttttgtcggaataaagggacttgaaaacaaataaaaaatctttaaatttccacttaaaatatatggtcgggataagtataatgcctaacatgcagaaaaaaaggaggaaatattacgaaaaagaaaaaggcacataaaagaacgagcaaattaaacttaaatgaagaagaaataataattacatattatgaagatggttatttactctctagttatatgactattttcgatattgacccatcaaatagcgctgtcatatgtacggatgctttttataacaagataaaactgcaattttctaatataataggtgtaaaatagaacaaattaacgttatcaagttagattcatttaagggagtgtaaaaatgcaagggaatcaattaaagaagaacacagcaggagtagttattcataatgatattaaaaaatacccctttctaaatatacctatgattattaatgaggaagacggaatggtttatgaggtattaaacgctggtttttacactaatgatgcagtagcaatgataacaacggatgattttactacaaccagggtaaatgcaccgattataacagtaaaaaacaatgatggtagtattcaagcatatcgtttacctttagaactagaacattgggtactttcttgtatgcgtgctgcttcagtagaaaaaaatccgtttccatgtaaagttgcttttggaatcatcgacactaaattttatgtggaattcaagtgaaataagaacacgattgggttgaatcaattaaaataataaaactataaaaaagagaagggtacttggtattatcccctataggtagacagtaaaaaaagagtccatctgatatgatggactcaatactgttttatctggaggggattttgtacatgcttaaacaagcgaaaatgtacatgtttatcttgacatttacactaatttccaaaacttccaccaggacttctttttagctgccctcccaccactatgagaggtaaatgaaggaaaccgatacagcttgtgcgtatgcagtgcattttggtctgggtcacagtcttttaacgtggtcgaactacagggggagtaagcatattcccgatggatccatttctatacctccattatctagggaaatcccccagtatccaagactaaattttacccatacatcattttttgatgtagctcttgaagataaaaactatttaattttcaaggaacagttattaacttaaaacttattatatgaggagggtgtatcatgaaaaaaatatgctttgtattaattgtcgacgctggtataaattatggttcaatattttctctaccatttttaaggaatcaggatgatttgaaggaatatttctctaagtattatgatgtctcaattaattatattagggataaaaactcagttgactatttggtagttcccaaaccgtgtccagcttttgataatgaaaataatcttccaataattgaagtaccagcaatcttatttatggaaaagaattttgaaaaaataaagacttatatagataattatttttccaataactcataaagaaaataaaagtacaataaaaagaagtccgataaaaaacgaatatttctattaatcattcgttttttattatatttacatatattttttaaaagaggattatagacgttctgaaaaaaattaattataacaagaacagtgttcgtgctactatctacggttattttttgtactaagtacccctttaactaacaagacaacaaaaaataattaatatattaaagtgaataatgttactatttttcaaacctaatctagaagacaccggaattctttcggcttcatattccttcatcagctcaaaatcagcctgattattaacatctaactttcgtaaatcttactttttatctatttgacgtatcatatttgaaaccttcaagctgaagctactttcttgcaccttttcaaaaccaaatttaggataaaattctaacaccgtatcattcgcgaataagtatataaaattataattcttctcgtattttttaatgatatgattcattaatttagtcgctaattaattgatattcattcatgataaatcctccattttttattatattttcctaaaaagagtgtatatttcttacaacaatctactactaagttttcgttaatcaccgccttataataggtgtaacggcataaaaacatgcttccggaatcaaaaaacgacaaaaaaaagaccacaagaagaaacatcttctcatggtcaaatttctgtctattataaatacacctatcccgaaagaatagatatcgtgaaataacatgaaattttttgataagatataatgtcttctaaccgctactagtaaaagggtataacaaataaaatcaaggaattgtccttaatttgaccttttacagtataaaattcgtttgaattttaattagcgattaataagcttcatcatatacaatcaaaacctcttttcaatataatttcttactaagaatatctcctttgaaaaccgttgtaaatgaagacataacaaaaaacaagatttatgtccttctgtatcaccaaaatcggtcgtttttggtgatacaaaaagacacatactattattctcgaaaactacagaaaaatccctccgtcttaagacagagggactttctcattcctatttcaaactacctgcaatctccgtaaagataactccaagcgcatgtgcacctgcatcagggtatcctaaacttctttcgccaactgtaccagcgcggcccatgcgagctacgatttctttcgtgtactctgctcctttaaccgctgcttctgcacctttttcaaaggcagtttttacgtctacttcgtttgaggcgctatctaaccaagagtctacacatggagcaagtgcgtcaacaagcgttttgtcaccaactactgctcctctgccgaatgatctctcaccgatcgattggatgccttgcagtgctgcttgcagtatttcagcgaattctttcactgttaactcacgcttctcgcctgctgctttactagctgcgcggaatgcaccgccccaaattggaccagaagcgccgccgcaatgttccataataatcatggagcaaccatcaaggaatgatccgattgttacgttctcttgatctacaatagaatgccactcacgttttaattgcttaaatccttttgctacactcattccgaaatcgccgtcaccagcgtgcgtgtctaactcacagaatggtacttcatttttaatgataatatcgctcattttatcaacgagataaatcatgttgtttaatgtaatgacattatctttaataacagcgtgttcttctgctgtttctagttcaaatgaaacttccttctcttctgtttcttcaagtacatttacatactctaaactttcaactggtccatctactttaaacgctggtgtattacattcttttgatagtaatgtttttaactcatcatctaatttcattacagttaaagacataccagccatatcgatactcgtcatatagttgccgacgaatactctattaattttaatgtttctagcagctaattctcgcgtcactgcattgttaaataagtaaagttcctgcagtggtgttccgccaaaaccgttaactagaagtgcgatttcctcgccatcttttactcctaaatcttttataaggtcatttgtcatacggttcgctagttcatctgctgacaacattttttcacgcttaattcctggctcgccgtgaatacctacgccgtattccatttcatcttccgcaagtgtgaaagtaggtgatccgctcgctggaactgtacaagacgttaacgctaaaccaattgtgcgcacgttaaccgctgctttttctgcgacagttttcaccgctcctaaatccatacctgcttccgctgctgcaccggcaattttatgaactaaaataactcctgcaacgccgcggcgtcctactgtatacagactatcttctaccgcaatatcatcgtccactttgacgtagtcgacttcaattccatcttccgtcgctaaatgcgcaccgtttttgaaattcataatatcgccgctataatttttaataattaataacgtaccttttttactagctgtttctttaattgcttgatatacctgaatttgtgaaggagaagcaaaaacatctccgcacaccgccgcatctaacattccttttccgactaatcctgcatgtgccggctcatggccactaccgccgccactaattaacgttactttgttttcgttcatttctttcttcttaatcactttatattttttcaaaagttcaagctctgggtgagccataaccattccgttacacatttccattactaatgtttctggtttgtttataatctttttcattgtgattatccctcaattcctttaatatattgtgatatatttgaaatcttcttcttactactcatgttaaaatgaaagcgttttatagtaaacggacaaaatggacaatctgtctaaagacaccgctctcatttatagataggatttttatattactaacattctagggatgattcagatgacctcttctataatttctaaaaagataatcgcgaactcattgaaatatttaatggaaacagagtcgtttcataaaatatcagtgagcgatattatgttacactgtcaaatgcgtagacaaactttttattatcattttaaagataaatttgaactattaagctggatttatagagaagaaacgaaagaaaatattatagactttctcgattatgaaaaatgggaaaacatttttgatttattatttgattacttttatgaaaatcaaaaattttaccgaaatgcttttaaagttattgagcaaaactcgtttaatcactatttatttgagcatacgaaaaacttatatatgaagattattgatgaactatctgtaagctgtggattcagcctttctgatgagacaaaaaatacgattgcctccttttatagtcacggcttcgttggaacaataaaagattggattgaaagcaagtgcgaagtagatccttccattatgtcttctcttatgaaaaatatgataaacaatcaattactactattacttgagcaatcagcaaagtaattaaagggtggcaaaagcaatgaaaaagattatgaatgatgtacaacatatcgttcaagatatgctgcatggcttttattttgaacataacgacaaagtaaattacgacgaaacaaataacatcatttatgtaaaggatatcgaaaaactaaagcaaaacgtcgcgattataagcggcggtggtagcggacatgaacccgctgatattggctatgtaggaaaaggtatgcttacagcggcagtaaacggcagcattttcactccgcctacagtggaacaaattgtagcggctactcgcctcatgccaaaagataaaagtattttattcatcattaaaaactttaaagatgacgttgagaactttctagcggctgagcagatcgctaaagaagaaggaagaaaaattgaccatatcatcgtaaatgacgacgtttcaattgaagatgatgcttcttttaataaaagaagacgcggcgttgctggtactgttttcattcaaaaaatacttggtgcgtctgctcttgaaggtcattctttagaagagctaacaacaattggccgttctgttacagaaaacttacacacattaggagttgctctttcacctgcaaacgatccagtgcaaggaaaagcttcattcacattaaatgacgatgaagtgttttacggcgtcggcattcacggagaaaaaggatatcgtaaagaagcactatcctcttctgaaatattagcaatcgaactaatgaacaaacttaaaagcatttatcgctggagaaaaggagacaactttgccatccttattaacggactcggcgcaacgccattaatggagcaatacattttcgcaaatgacattcgccgtttatgtgagctggaaggattacagattacattcgtaaaagttggtacattgctaacttctttagatatgaaaggtgtttcgctcagtttgcttaaggtagaagatttggattgggtgaagtggttgaaggaaagtacggaaactgctagttggtaatacaaataaagtgaaactttaatcagccctcaccaatcgggcttttacgggcagaccgatcctcaccttgaaataaacttttagataactcaaaataacaagcaaaaagtcccttcaaagttaaagggactttttagtatgtagaaattagcctaaacctaagattacatctcttgaaagggggcatttttatgttattcaggtttattgaggagcttttgtttgaagcaactttaaccccataccaataaaaatcagtcctgttatcttatttagaatcattcctaccttttggtttcctcttaatttttttgtaacatatgaagagaaataagcaacaaataaacaccataatagtccagttactgtaaaagtaagtcctaaaatgataaaaggcataggacctgaagcctttgtatctataaattgcggaagaaacgcaataaagaataaagagacttttggattcgtaagacttgttaaaagcccttgtatatatatttttctaatgttcaatttattggacgagacctggaaagctacattcgtcttatcaagtatcattttaatccctaaatatacaagatagataacacctataaccttaatagtgttaaatagcacaatggattttgtaagtataatagataaaccaaaagcaaccaacaacgtatgaactaaagaaccagtaataataccaaacacagaatacatacctgcttttctaccttgtgaaatacttctccccacaatgtacatggtgtctgcaccaggaattaaattcaataaaattcctgttagtaaaaacacttcataattaataataccgtacattttagcacctctatctatttttttggtgcccttattgatattaaattaaataaacgaaaaaagaaagtattttctatttattcaataaaattagcggatttttgaatctacaaacgaaatccagctatttaaaaattcaattactgaagaattctgccctcaatattacagcaaatttacattaaaaatgtaaatcctcatttcctttgtattttcctttattaagtctttttcttatgaataattctgcaacaattaaattgggtacccacgctaaccaagcaataatagcgtaactaagttcaaaacgctctattccaaatagaacgataaacaacggtagccaaattcttaatgtaactgctccaaaggttaaagaataatttctaatcatccaattccgatgctctttaatttttttattcttaactccatgtaacgcttgatatgctgatgttagccaaaatacagataacaaaccgaaacctagcttcgctaccaatcctcccgtagcataaaaagataggtatagtccagaaacgcctcctaataatataccaaccatatagattctcccaattattcgatgacggttgatattcctttctctaaatctagtggataatgtaaaaggaccaattactaatgctactatactagttgtaatatgtataaatagcatcatataccagaacgcacttaatttagatccaaacataagcttcacttttacaagccctgtttgaaatccatccataataaaatattggacaacaatataactagctactaaaaatgcaaaacaagtaactacaaaccaaattttcctgttcaaattttactgcctccttattacattcacgaaaattagattatatatttcttttcattctcgggaaaaatagaaaagccttctttactctctttagcacattgtttttataaaccgaatgacttacatgcaacgacgaataaaatatatgatacaaggcccttcttcatacataaaaaccctcaagtatgtcgttctatacttgagggttttttcatttattctctctcgtctctcattttcttaaatcaataattagctcatctgtaatctgctcaagatggaaaaatctttttatataatggatatcagaccatttttcttctccaccaataataaataattcttgcgcatcatacataaatgaaaagcttggatagaaactgtccgcttttatttcaatcccaccagtacgattactgataatcttacagtctgctgaatagcttaatagcgtatagagagaatcttgtgctgattggaagaaatacttcataagtgtggttatatcatcactattggtaatgcacactttaaaaaagttcgtatcctttttcttattagtaaaaactagctcaaaatgaagtttattctcttctaaaaacccttcaataaagtctctacataaataagtttcaaataacatatacataggaaatttgttatgtgcgcctataaatcctttaataatttcttcaaatcctgtatgctgattcaaattcgttcccactcctatcataatagggtgatttaaataaataggatacggtgattgcccttcatcttttaacatatacactcgtttttcatctgtatgaagagctggtttagactcttttagtaagtattgagataattgaacatttaacacatttacacctgcctatcatgtcatacataaactgtatctattaagttagaaaaaaggatgaacaattcatattttaccgtgtataagcgagaagaactagaatagatcgccggcttacatgtctccaggataataaatgaacatcgcacctacaaatgaaaaaactaaacaaaaaacagcctcgtattttataactaaagaagagttcgtatcaagccttttttcctctcttttacatatcattttaaacattttaaataaaactctatatattacataccccacaattgccccaagggtattcgtaaatacatcatcaatatctgtaattctattatttaataattggtttaactcaattgccaatgaaaaaaagaatcccgcacatacggtgtttttcatttttctaaactgcgaccaaatagtcggtaataaaaaacctaatggcataaacagtacaatgttcaaaagatacgtcgtactacctgccgtatcaaatagagtcaagttgatttgacttacacgaatccacgtttcatatctacttatatcccatacagtcgcgatctgcgtcaccctatacactagcgaaaggtagaatagaaaaacatatacccacaaaaaatgcagaatagatatagttcttttcgctttaaaataaaatccaatttgaaacacaatacaaaacataatagtaaaaaaataagtatacaaataactcatcaaaactcctgtatccatgtagaatcccctaactttacaatttcatctatgactttgttgtttataggataggagaaacttttaaaataaaaagtggggtaaacataaaatttttcttaaatcttcagttgggttttattattactcttcttaggaatccaccattgatagctaggcaacagtatgcttacacttaacaatattatcatttttgcacgtaatcctcgtaatactttaaccgatgaagcatatataaaatcatgtgaatcgtttgttcagttaaaacatgaaattaagaaatatatgacgtactataatcactcttgctatcaatagaatgtacagaagatgactcctgtttgcatacagaaatcatcttttttaggttaccgattttttttataatgtcctttacaaagggtacaaatcaagagcatcttattcctattcaaggggatcaactataccttcctcccttaaaatcactaaaacccatttacgaatctataaaagtagatataatatccttatggaacctttattaatttataaagcattgtcaaatgaaacaagatgtcaaattttatcatggttaaaaaatccagaaaaccatttcgacgaaaaaccttacctagaacaagaccttaactttcaagttggagtatgtgtaggagatatccagcttaaaactggcttagctcaatcggttatttctagttatttattaactatgaaaaaagcaggcttactagagtctgaccgaattggaaaatggacctactatcgtcgaaatgaaaaaacaatacgagagttttctgaatacgtccaaaacgaattataaaatgaaagctaataatcaatcagcatactaattgattattagctttcacacattctgcttttttacaggtatccaatgacttcttataaattgcactgcctgtaaaagcaagaaacatcgaaaggagaattttttttaatatatcatatctagttatttagatatctgttattgtatttcagattacatactcctgataatattggcatccaatcatgcttataataatgcttctttgttaatgaatttactttcaaaatactgatacgaatggagagttttataaatgaaaaaagtaaatcctttacttattctgacactcgcaataggtgtgttcggaattattactaccgagatgggtattgtcggcgtattaccacaaatcactgaaaagttcggaatttcaactacacaagctggatttttagtaagtatatttgcactagttgttgctatttctggtccgtttttaattctgctcgtctctagtattaatcgcaaaataattttattaacagcaattttcacatttgttatttcaaatttaatctacgcttatacaacacaatttgaagtcatgcttgtttttcgtattttaccggcagcgcttcatccactcttcttttcaatcgctcttgtaacagctgctaaacttgtccctccagaaaagagcggtcaagcagttacaaaagttttcatgggaattactgttggtttcgctttaggtataccactaacctcttaccttgcagaccaattttcactcgaaatggctttcttattcggagcattcgttaacactcttgcattcattggaatactactcctacttccttctatgcctgttaaagaaaaaatgtctttcggcaaacaaattcgtatactcggcaaaccaggattatggttaaatattttaaccgtcacattcctttttgcagccatgttttccgtatacagctacttcgccgagtaccttgcaaaagtaacttccatgaatggatctctcatcagtatcatgctattcatatttggtatagttatgattttaggtaatcatttatttggtggtctcctgcaaaaaagcataataaacactgtaatatcattccctattctatattctattgtttacatattggtttattatttaggttcctaccctgttccaatgatttttatagtattcatttggggaatcgtacatgctggtggattaattgttggtcaaacatggttaataagtgaagctaaagaagcacctgaatttggtaacagtctattcgtttcgttctcaaatctcggaattactttaggaaccactattggaggctggttcatttcaaacttaggtattcaccagcttatttggagcggctttatattcacactactctcatttctattaattataataaaactaaaatttttcaattctaatagccaggcttcattatcaagctagtacattttcagttccaaattcgataaagtgaaactttaatcagccctcaccaatcggacttttattaatttcaacgtttagacagatacataactccaaaactaaaacgtttattgcaattatcgatatggaacattttacaaaacaacttaacatggtaaaataatattcggacaggagtccaatattattaaaattaagatggttcaagtcggaggaaggcaccttagggtgtcttttctttatttgcaaatggacctgctcaattattgtgtaaaaaacataaagtaagttgaatccattaaaatacatgagtgaccccttgttttcccctcttattaaaggaggaactattatgggatttggtggtagttgtagtagtggttgtggcggcggctttgctttactagttgtattgtttattttattaatcattgttggagcttcttgcttctgctaaaaaactattggaaaagacactcttatatgaactgaacccaaaaaattagacaaatatattaagcagctactaaggattgaacatggaaataaaaaccagtctatgacccatttttacacgtatctcggctgaaccccgaaaacatttgcttccagccaattatgttcttgttgtggatatcaaaataaagacgttaaaaatctaaacctacgtgaatgggactgtccttcttgtcgtacacaccatgatagggatattaacgcaagtatcaatctaaagaatgaagcgataaggcttctaaccgcaaggactgcggggttagcctaatcaattagagttcgatagaactctttacttaggaatccctcacttctaaacgaagtgaaagtggggtagttcaagacttatttaattcacaaatagaatagcagctttttttagttaattactgttaaattgaaaagaaatgaaattgattaatagtaatcaaatcggttttaatatagtttatttttatgggaatatgaagtttatacatgcaattttgcatacataagcataaattatttaaattaatatataataatataaagtttattttaaagtaatttagataattggttaattatttatctaaaactaataaaggattgatataaaatgtcaagaattagcataacaaagtcccaagatagtataatgattgcatggcaatcagcagagattaccatccctttaaaagatataattactatatctacaaatgacgttcctcataacaagctcgatcatgttgtttatattggaactccatcttcctcaaagaatagaatactgatacatactacaaacttaaacttcattatatttgttgttaatccatctatagttttagaagaaattaatattgagtaataacgttatagaaagacattaaagtataaactaaaatctcatgaacaatcgttgataaatagtcattagcataaatttagtaggggaacgatgtgcctcttgttataatggaatcaagatgcgaaaattatcatttttaaagttggagagataattatggatactagttatagatttagcgtttttgagttaaaacatttattgcatcttatatatagtgatctttgtacagcgtatgatgttgtaactaagaaagaaaacgataaaaagtataacagcactagaatttgtaaataatgctcatagcacgtatctagaatctcgaagattatactttaataaaaagattgaacgacaagaattcgaggactttttttgcaaagttcaaaagattagaatgcgaacttaaagaagttatttcagaagaagataagaacacagcttggctatattcaagacatgaagactttattgaagatggacatattttacttactaaataaagttttacagaaattagaaaaggaaaaaaataaacgtaccataaatagagaagagtataaacggatctttaaagaagtatttgatatttctctgaacaaatactccgataaaattttagaaagaggctagcttaaactagcacatatgaattcacttgaggtagttagtacactttatttgcaatatgttttaagagtgagaaagcataaaattatatctcaccattgtaaagatagctataaaagtaaataatttgtatcttactctcaatagaataacttcccataatattgtattttaagaagtgttaatcttgagaagaataacagatttcatattagggcttaccggtggaattatgggtatcttatttttcatttttactatatttattgataatctaagtaagactctcaaagtagaaggtgcaaatgggataatcgttttaaattggctccctattatattatctgttattgaaattattggttgtttaattgttacatttaatgctaaaataggtgggtttttaatgattattgccgctattggtggtgttatttgtatcacactcttttatttattgccaggtgccctattattaattagtggatcaatgagtattttttgtaaagaaaagcaaaaactcaatgtaatatagagtgatttttcccattcctacttagctaaaaagagaaaaaactgaaaaaacatgtatctaatcagaccagtatcatgcatagtatattggtctgatcggattttaaaaacaattagaagagaaataatattatagcctttttatatggggaaagggctatttgatttatggggagactttcatccaatgtgcatttcttccttttgaaacaagtttaacttcgccggataattgtaaggtatttaatgtcttactaattgtactcttagctatatcagggtatatgctactgatagtttcttgagtaaatggctgtttttggttgtatacaaaattttgaatgcgttcaactttactttgattacatatagaatcttgtattctgttgtgtaagtctttatatgcctctaaaataatagttaagaaattttttaaccagaaactaatattatgttcattacaataccaattaactgaagatttacatatagcattgtagtattctgattgttttttattgatatatttatctaaacaaacatattttacaaatgtatgtccattttttattaataataaatgcattaatatctgagtaagtctaccatttccatggctaaaagggactatgcaataaaaactcaatataaatcgagcaattagtaaaagtgaatgtagctctttatttttatataataaattgtattggtagcacaagtcgtctacagtttgtggaatcagttcatgagggagcggatggtaattggttatgtgtattccgctatctttaaattctggtatagaaagtggtttttgacgccacattccactatctgaggtataaaaattcattacttgaaaatgtaattcttgtatagtttctggactaatagataaagtgcaagatttttgatgtacaacagccagagtctgatagtaacaaaatatcgcatcttccggaacagattcaggtaccttgttattaaaaatgagttcttttattcttttttttgaaatttttttatctgtataaatagtagtataatttttcatgtagtgtagaggtataattttttcgaaattattaaatatgtctggcctctgttcttgataagaagctaactttcctttatactcactaatttcgctaattaagtttattaattgccttttaagttcaacatttatgtacttgtcttcaaagaaatttcgcacgctgtgcctcctattattccccatcaacataacataaaatcatccattctattacaatctgatactctagttctctatttattaagaaattaaattgatattttagctattaatttaattcggacaaaaaatattattctctcacaataaaaaaaaattatattaagatttttatagatataatgttaacacggaatcaataaaaatgaaagcctttccatgataacgtataaagtaattttaatatagtaattttaaataggcaattgataaggataatttagttttagacagaaaagttttttatagtaattcgttttttatcatataattctttgttgcttaattataatatttattgtaattgctgaacaactcaccacgtaacgtcttcatgggtagtttgaagtgaaagattcttaggcacaaagttctatcgaactctaatggaattgggcattcccactcatgaattgttaaatcttaaataccatttttttgtatccataattagaatataatggactagaagcgtcaaatgaaattttaattagtcctgaggtacagaataaacggtttaataaagcgctaatctaaatggcacaagtatggacaaaatataactttaggagacttatataagattgttgttccagtaggtaggcattctgctggtactatgctggtggaattagaagtttgaacggggagagaatgtaaatatttactcctatgacagatagtaaagtaaaatatgatgataaaaaagcaacgattgataccatgctaaaatttgacaaaaatagcaaacacatacatatcaattttacaaggatacattctgacggtacagcttgaagtagtcctcaccctaatcgaacactcattttgctgctaaagtaaaatcagaaaacttaaggaatgattaggggtatttaggaagtagatagattctaaaattacataaaggtaatatccgtgataattttctctattttgagaaagtgtgactcatttctttaaattttgtaacaaatcgccatagcataaacctctatcaaaaactactgaaaatgcaaattactattataaaaatgacaaatttgttaaaaataggatttaggaagttttcttgccatttaactggtaatattgacatgtagggataaaaaattagaaaaggggataattgattatgtttacagtaaaacaaaagctagttaccgtagcaactactttagcattaggctctggatttacttttggaataacacctgcttctgccgcatcgaacgaaacttctacaaatcatatttccatctcgtcttttgagaaacaactgcaaacacatttcacaggttatgttgtttctgttgatagtaattatatgacgattgtggatacaccaacgatagaaaaagctctattgtatcaagaaaattggtgggatttagttaacaaaaataaaatattgctcgttccaactttagataataattcttatactatcggagataaattagatgtttattttaaagcaatgacaatgtcgcttccacctattgcgatgtcacctatcgttgaaaaagtaatagaatagcctagaatactaaaaaagaagagttggtacaaactcttcttttttatgaatgatatccatcaattcaagagtaatcctgtcataagaagcttctatgcgtataatcttgctatttagcagattgatatcagttacaatcatgtaatgtaatttgaaagccgattgccacctttaaaatgaatgaatcattaatattattttatctgcatattaataggacgttcacctatcctatacatattttgcatttctaaaagaaaaaaattagaatacttcaataatataaaaaccaacaactggagcgtaattgatgtatattttttcaacaaacgaaaggagtatttacatgttaactgaattacaaaagaatttcctctcaaaattaaagatttcatcaaaagaaagtatccaatttgataccttgcatcaaattcttttacagatggcacatttaataccctgcgagaacatagacattatggaaggacatcctcaaaaaatttctcgagtaaatcttgaagaaaaattacttctaaataatcatggcggactatgtatgctatgagctaaattcgttattatattattttttaagtgattgtcaatttaatgtttatcgaatagcgggtactctttatgatcccaaaataaaaaaaatggaaacctgatgacggacacgtaataatcattttagaacacaaaaatactaactacatactagatgctggtttcgcttcacaccttcccttacatccggttccctttaacggtgatactattaagtctccaactggagagtatcgtgttcgtaaacaaagtacagctaaaggtacctatgtattagaaatgagaaaaggaaaaaatggagaaacttcacatttccttggttctgaacctagtcataattggcctattggatatgctttttctttggaaaaaatcaatgaagataaagtaaatgatatacaaaacattattataacgaatccagactctcctttaaataagggacatataatttgtaaattaattaaaaacggtcatatttcacttacaaaacaaagttttacacacactcaatatggggagaaaataaaaaaagaaattaatacggaacaataccatcgaattcttcaaacagactttaatatttttaaataaataatattatgttttcggaatattatacagatattcaacgaatatttttaatgtattagagtgttgtgttatagtgcttccgaaatgaagttgcattttagtgaaagcctaataaacgggtctatgcagcatatgtaatgtaaattcaaaaagcatttaataccttttaggatgtatgttttagttatttataaggagactatttttaccttcattttttgcgaaatccctacacagtattaagaagaggttctaacaaaattgttagagcctctttatcttttcgcaacaaaagaggattttaaattttttatccaaactgattgatgtagatcagtatgagaaatccaattccctgttttatgagaaccgataaattcattatagggggggataccaaacaattaagtaagtctcatttttatattatatttcatcaaattgacataacgcttttcctactatattggattgtccggtgggtattgctcctttttctaaaatctcattaaactgcttcaaaaaccatcacactccttcggataagtttaagtatatatttttcaaaagatatactttttcctcttttatagctgaattagaatgaggattttaaaaacaaacgaaaaaaataacctctatacaaaataagagtgattttttaggatggcatattagttatttatatgatgaaaggggtgcttaagagaagcatccaaaatagtgatttttttgtttatattttcaatacaatataatgctttttaataatttatttcatttaaaataccacaatctttaattcttttaaatttatctatcttaacttgttagtaatagaatttcatttttcaataagtatatttttctacacataaacatgtacacaatatgataaattttaataaactcctaaaaatacgtaaaaaagcattggattttgggtatataaaaatataaattcacaataatttagttggaatcttactttactcactaattctaactaagtctatggagtacaagaatagtgggcttatagcggaattaatgaaggtgagatatatcattaaaaaacattaaaaataggtccattatttgtaaacataatttttcatgcatatatgaaaagagatatatccttttatttatagatgtagtctaaactatagttgtgcatgagcctgagtaggaagagaaaagataggcataaaaaaagtggatttctggcatcttaaaaatttatagaatagtggatacagattatgtcctttatacatgcatgagagtatacattgagtattaataatatagtagaagggagtgtagagaatgttagagaatgaagctgtattagtgaaaacatttctagccacctttggtggtttttgcggttactttttcggtgcatgggatgtattattaaaaatcttagtaactatggtctcagttgactacattacgggaatgattgctgcaggttataatggaaaattaaaaagcaaaattggctttaaaggtattgctaaaaaggtcgtgttatttcttctagtaggcgttgcaactcaattagatatgatatttggaagtaatagcgccattcgagaagccacaatctttttcttcgtgggaaatgagttattgtctatctcagaaaatgctgggcgtataggtattccgcttccacaacctttaatcaatgcagttgaaactttaggtggaaaaagaaaacacaataaaaaagaagataaataatgggggaatttagtagacttaaaaaacatggtatacaatgaatccagaccttattatcatttataatgtgtacaatacattaacattgtgcccaaaaatgaagttgcttaaatgattgaaaataactagtaagtttccttctatgcttaaatatcaatttaatttacccttgtaagaattggatatcgtatgcttatttctttcacaaaaattatataggataattctttaaaaaattgttaatagaattaattatttaatatgctcttttagatgattttctctttttgttttaaaatttctatagaagaatatcaacatacttaaaaaatatacataaaaataatattataaaggatgatgtgtttgaagcaatttaaagagatgctagaccaaggagcgatttctattggccaatccgaccaatttggaaaacctttacgtcaatttgatgaagtacaatatggaaatgaagtctatcttgttatttggcatcccatctatagagaatttgtaggttctcatgaatcagggaattggattcctaatactaatttacatcaatctatatggattaagaatttaaaagagcattttgcaaacaaaaaataaaaagattccaacaagtttattagagcctttttgagatactctttagggatttcttcaaagaacgaaattaattatattttatataactaagacataaatataaaaaaagacatcaaaaataataagtcgtttgttttcgagatgattgtctttttacaaacaaaatgcgggttgtaacagattttttacagctcgcattgtattagtttggaacccatcgtacagatcatatattttaaataatccaaatacagattgtggctttatttatattttaaacttgtatagttctttttctttttaaagttcgtgcagatgataaacaattaacaacttgctgatttaacaaagatttgttccatttaattgtaatccgttaagctagtaatcaacgaacactttcattctattttcttactatttgcctttaaaatatgtcactcatacttccgatcattctatttcaaatagttgaagttttctctcttataacttttaaattcacaaaattatttgactcctcttgttgaactatcattaatatatatatatattaatgataagtttaccttatatagattattagtatttttttatcaaactaaaaaacgttgagtacattgggctaaagcttttctattttaaaatatggtgcaaatccctaggcaaatgtagattatataaacatgagaaataaaccagtaatctgaggtatgcattcaatgcaaaatgctttgaatacagaaaacagtatgctataagattttagagcgactaacaatatgtctcaactacatataaaccaatttttcacaacccttatgtaattgctaaatcaaattcaagtaaaaaatataatatttatgtgaaatccatagcttttaagaataatcgttcattaattagttcaggagcgaatagcaaaaatactcctttatagtgattgctattataacaaatcaagttttctactcattttcaacaaatataaaatatgcgtacaattgagattaaaaataatcaagcacatctatatttttcaattgtacataatattggtgaagatagtgcataagatttaattattttagtgaattataaacaaaagtcattataggtctgaaatcaaacgaaataaatgtttaagttttttttgatataactctaattagtttaaaatatattaaatttactgttcctaaatgaggtgaataaaaaatatagcagtcaacaaaaatacgttcatttcgaacgttaattcaaaattaaccataaagagtaaattcttttactcataaaacgtgcagggaaattcttttttgtattgtatctacctgttttctacacatctctaatcgtttttatacttgtaatcatattagtaaccaaaataattcctgcaataccaatggtatctctcaataatatcccttattcctcataaaaagatacaaccatagtatacatatagaacaaaaaatttaaaataacgcatttctatgcgattatcttgaatatttatgatatttgtagcacttttcatttataaaaaagcatagatatcttcctctatagaggaagatatctatgctttttctttttggattagagatatactttactcaaagccgcaggaaaagagttaacaggtgattgaattcaatttcatcaatggaatagggggcaacctgtgtgaaaatgaattaaacaattgttgcctttaataaatggattctctaattacacctgttaatctatgaggaggaggacagaagtagttaagaaagcggtgaatggatcccttaaaaaaattcaagaaatatgatgttgattcttagagcaatgaaagagttattaccctgtttaaggtgtcatgattctcctagaaaagtaggcagatgaagaatggacgatatgcatacggataacgtgactcgtaaaaagtacgcttcgtatatgatatgtatatttcaacgtacagtcatcaaaatgtaacatgggaggcgtgaaaatattgtgatgaataattggcatataccgtttactccccacatagaatgtgcagagcggttttagaggtacttgaaacccataaatgaaagtagaagggggtgaataccatgcatgaatcgcaagaaggtagagatgttccgaatgggataactaaacataaacaccatataccttttcagtgtatcgtttcccttccatcaggttttcaaattgaaaagccgaatgatttgaaacttgtttacgatgtaagtcatttgtctatgacgaaagatacgtgtaaaaaacgtattgagattgatgaatgtggacaagtagaaattgacttacaagtattaaagattaagggagtcctttcttttatcgggaatttttctattgaacccattgtgtgtgaaaacatgtatacaacggtggacagaaatccatctatttccttaagttttcaagatacggtatatgtggaccatattttaaaatatagtgtgcagcaattaccacattatgtcattgatggtgatcatattcaagtacgtgagttacaaatcaaattgatgaaagaaaatccccaatctgctcaaatatctggtcttttttgttttgtgtatgagtaagaaccgaaggtttataaaaaatttaaatatacactatagtgtctttatcaggattgaaagtgaaaaactataggtatagatgttagctagttatcttaataattcaatagtatccaaaggatttaactatgcacgataaaaatagttaataggaggaaaagattttatgctaaaatatcattttcctaatgtatgtgaagatgaattaattaatatatattcttatggggattttaaaggacaaggaaaatatatatgcctctttaaaattgaaaaccaatcattcttattttggagaaacgataaaggaaataaaatatatacaaatttagaatctatcagtgtagaaataataaacacgaataatacgtataatcaaagtcagaatgtatgcccacaagatttagttgatacgtataatcaaagtcagaatgtatgcccacaagatttagttgatacgtataagagggtatatcgaagatagtcaagacttagaaatctatttaattcgctacaatgcaaaacatgaaacagtaaatgtgccaggtacgggttccttatggccgctttcagcccaaagtccaatcggaaagtgtggagagccgaatcgatgcgcgccacaccttgaatggaatcctgacttagattgttcgtgtagggatggagaaaagtgtgcccatcattcgcatcatttctccttagacattgatgtaggatgtacagacttaaatgaggacctaggtgtatgggtgatctttaagattaagacgcaagatgggcacgcaagactagggaatctagagtttctcgaagagaaaccattagtaggagaagcgctagctcgtgtgaaaagagcggagaaaaaatggagagacaaacgtgaaaaattggaatgggaaacaaatatcgtttataaagaggcaaaagaatctgtagatgctttatttgtaaactctcaatatgatcaattacaagcggatacgaatattgccatgattcatgcggcagataaacgtgttcatagcattcgagaagcttatctgcctgagctgtctgtgattccgggtgtcaatgcggctatttttgaagaattagaagggcgtattttcactgcattctccctatatgatgcgagaaatgtcattaaaaatggtgattttaataatggcttatcctgctggaacgtgaaagggcatgtagatgtagaagaacaaaacaaccaacgttcggtccttgttgttccggaatgggaagcagaagtgtcacaagaagttcgtgtctgtccgggtcgtggctatatccttcgtgtcacagcgtacaaggagggatatggagaaggttgcgtaaccattcatgagatcgagaacaatacagacgaactgaagtttagcaactgcgtagaagaggaaatctatccaaataacacggtaacgtgtaatgattatactgtaaatcaagaagaatacggaggtgcgtacacttctcgtaatcgaggatataacgaagctccttccgtaccagctgattatgcgtcagtctatgaagaaaaatcgtatacagatggacgaagagagaatccttgtgaatttaacagagggtatagggattacacgccactaccagttggttatgtgacaaaagaattagaatacttcccagaaaccgataaggtatggattgagattggagaaacggaaggaacatttatcgtggacagcgtggaattactccttatggaggaatagtctcatgcaaactcaggtttaaatatcgttttcaaatcaattgtccaagagcagcattacaaatagataagtaatttgttgtaatgaaaaacggacatcacctccattgaaacggagtgatgtccgttttactatgttattttctagtaatacatatgtatagagcaacttaatcaagcagagatattttcacctatcgatgaaaatatctctgctttttctttttttatttggtatatgctttacttgtaatcgaaaataaagcactaataagagtatttataggtgtttgaagttatttcagttcatttttaaagaaggtttaaagacgttagaaagttattaaggaataatatttattagtaaattccacatatattatataattaattatgaaatatatgtataaattgaaaatgctttatttgacattacagctaagtataattttgtatgaataaaattatatctgaaaattaaataatagtataagtggagggattaatatgaaactaaagaatcaagataagcatcaaagtttttctagcaatgcgaaagtagataaaatctctacggattcactaaaaaatgaaacagatatagaattacaaaacattaatcatgaagattgtttgaaaatgtctgagtatgaaaatgtagagccgtttgttagtgcatcaacaattcaaacaggtattggtattgcgggtaaaatacttggtaccctaggcgttccttttgcaggacaagtagctagtctttatagttttatcttaggtgagctatggcctaaggggaaaaatcaatgggaaatctttatggaacatgtagaagagattattaatcaaaaaatatcaacttatgcaagaaataaagcacttacagacttgaaaggattaggagatgccttagctgtctaccatgattcgcttgaaagttgggttggaaatcgtaataacacaagggctaggagtgttgtcaagagccaatatatcgcattagaattgatgttcgttcagaaactaccttcttttgcagtgtctggagaggaggtaccattattaccgatatatgcccaagctgcaaatttacatttgttgctattaagagatgcatctatttttggaaaagagtggggattatcatcttcagaaatttcaacattttataaccgtcaagtcgaacgagcaggagattattccgaccattgtgtgaaatggtatagcacaggtctaaataacttgaggggtacaaatgccgaaagttgggtacgatataatcaattccgtagagacatgactttaatggtactagatttagtggcactatttccaagctatgatacacaaatgtatccaattaaaactacagcccaacttacaagagaagtatatacagacgcaattgggacagtacatccgcatccaagttttacaagtacgacttggtataataataatgcaccttcgttctctgccatagaggctgctgttgttcgaaacccgcatctactcgattttctagaacaagttacaatttacagcttattaagtcgatggagtaacactcagtatatgaatatgtggggaggacataaactagaattccgaacaataggaggaacgttaaatatctcaacacaaggatctactaatacttctattaatcctgtaacattaccgttcacttctcgagacgtctataggactgaatcattggcagggctgaatctatttttaactcaacctgttaatggagtacctagggttgattttcattggaaattcgtcacacatccgatcgcatctgataatttctattatccagggtatgctggaattgggacgcaattacaggattcagaaaatgaattaccacctgaagcaacaggacagccaaattatgaatcttatagtcatagattatctcatataggactcatttcagcatcacatgtgaaagcattggtatattcttggacgcatcgtagtgcagatcgtacaaatacaattgagccaaatagcattacacaaataccattagtaaaagctttcaatctgtcttcaggtgccgctgtagtgagaggaccaggatttacaggtggggatatccttcgaagaacgaatactggtacatttggggatatacgagtaaatattaatccaccatttgcacaaagatatcgcgtgaggattcgctatgcttctaccacagatttacaattccatacgtcaattaacggtaaagctattaatcaaggtaatttttcagcaactatgaatagaggagaggacttagactataaaacctttagaactgtaggctttaccactccatttagctttttagatgtacaaagtacattcacaataggtgcttggaacttctcttcaggtaacgaagtttatatagatagaattgaatttgttccggtagaagtaacatatgaggcagaatatgattttgaaaaagcgcaagagaaggttactgcactgtttacatctacgaatccaagaggattaaaaacagatgtaaaggattatcatattgaccaggtatcaaatttagtagagtctctatcagatgaattctatcttgatgaaaagagagaattattcgagatagttaaatacgcgaagcaactccatattgagcgtaacatgtagaattaaaatctacctaaatccagaaaaataaaagggttaaatatacaattcttgtaccaatattttgagtgattagatgtaggatgaaatttaattgtatgctatttaacagtagagatattaaaaattaatttatctatacattaatagtatagacatacaaacataagagagcattgtcttttcgtaggctacaatgctctctatttactatttatttttcttttgtatcttcaaattgacgttgttctaagcgttctattgcagctcgtcgtttagtatcatcaatgtttgtataaagagatgttgtttccatagaattatgtcccatttgatttgctaataatactaaatctttattttcattatagtgattagtagcataagtatgacgtaatttatgagggcttttcttttcatcaaaagcccttgtgtatttctctgtaagcttttgtatagcattaacagaaatttgcgcataggatcctttataatttgttacaaatagaatatcttcagcatcaggacacttgtaacgagcagcacgtacttttagatactcttgaacatcatctagggctgtttgtgtagccaaaatagatgattttttatctccttttcgtacaactttaatgtaacgagtacgaaaattgatactagaaatagttaaactagctgtttcagatacccgaagtcctgtacctaaaattaaacttagaatagcaatatcacgctctctatcgcgtttgaagaatcttaacttaccgggagcgttttcttttagcatttgctcatattcattagataaaaagcgcataaatttaatatcatcattattgtgaaaaataacttcagaaatttctttcgctcttgctgaagcgtcaattttttccttatgaatttccattttggccataacatttctataaaagtaacattctccattatcatcttcagtgtttttggttaggtagttaaataatgattttagagctgaaaatgttcgtataattgcctttgttttattaccttgtctctctaaatagcttttaaacctttttacttgtttaagaggaaggtgttccaatgtttcaattggcacctcatgtaatttcgtaaccgttacaacttctccatttacgaaaacaagacgagaggagatcaaccaatgtaaaaacatttcatattcaattaaatatccatacaaagtagcaggggagaggttcgttttctcttcaatatattcaatgatataccaaggcattttttctttatgacgttctacacgtgctttatacacttgtttttctcgattgctcaattttttcacctcaaacttcaaaacagtacattgattttctataatcaatgtactgttttgtcttaatttgtctaattttacattaaatacaattttaattgatattcttacgaaaacaactttatatagaatttccatttaaattaacttttaaaagtctttaatttattgcataaatatctctagatgctgcattgtcttttttatatgattatttttaaatacgtgttttttacgttcattccaactatggatataattgataatctcatcgaaatccattattgaattatttccatactttatagaccaatgtacagtagctaaaagctccataccataaggggtttcatatccttcaattaaattttttacctcttcaagtctttttaaagattcttcatcatgagagataaactctttagcttctaatattgcatcttcaaacagattaatatcagatttagaatttcgatcaccataaccacgaatataatgtccttctaaacgaattaaaacatgatttaaattttccgcatatggaccatatatatatttcacaaaatttaaacgaagaggctctccacactcttgtaaaaaataagctaatttctgtatttcgagaagcgaaaggtgatatcctggagctctgtattgctccattaataatagtaaaagagctcttgcttttgtcatttttggcttagttgtacctattttcatgctatttggatcaggatgaccagaaggttcatatagataaactgtagtatttaagtcctctaatgactttataattaaaggctgtacttcactccaatctaagcccccattaccacatccaagaggaggtaatgcgatcgattttatattataattaataatttcatttcttaaagaactaagcccactcttaatatcttcaattcttgatttattcttccaatgccttttagttggaaagtttataatgtattctggtgatcctaagaggtgtgttttatatataaacattttcccaggctgaacttgattaattttacatgccttctgataagctttaaaattatcagggaatgcttgtttaaattgaagggcgataccttttcccattacaccgactgtattaacggtattcaccaaagcttgtgcatcagcttctaacaaattgccttttgttattttaatcaatttctaccaccaccttaataataccaattaggttttaatttaactgttaaagaaacattatgttcagttaatattttttcggtttcttctttatatttttgactatagactgcaatcccgataatacagtcaagtgggacatattggtaaaccagaaactctgccattcttctacgctttctatcattgtcttcaatcgtgtcatgccaatatttactcttcattatatcccaatcaatgttgtgcaattctttaagatcattgtaatactcagtgaagtgcattattccatggccatcagtaaaacaaaaaggaaccccgttttgctttattttttgcgctgacgatacaaaataaatgagaggcccttgcccctcattatattgtgtgacattacctttatagatactgtataacataggtgattttggagcgaaatagaatggaacatatttatgtaatgttccaaatggttctactggaactgagtaataagctcgtctgttttgtatatcattattagcaatattacaatatgtttgcccattattcatgatgctagagacacacacgagtccatttgaagataatatttttgataaatttctataatgagtcatatgatatataaatgtgtttgaatgcattatgtacctcacgatattaacgtttaattttatttatattataacacactataattatcaattaaactcgaatttaatgtaaaattatttcttaatcattaacaattcatacagcctgtatatagcctccccctttattctttcatgtaagtttcttctcacatataacacgttcatgctatgaatgtgtttcataaattccattattacatatatgaaatttgatttatgctcaaaagaggacaactaaattgaagtgcccccgaaagttagacaggtcgtttcattaggcagcctctagggtatgagcccggtattgtactgggctcataccctttaattttgccttaattcttttatgattatagtattctatatactttgctaattcttgtttgaaatgtgttatactttcaaattcttttcgatacagaaattctgatttcatgataccgaaaaaattttcaataacggcattgtcataacagtttcctttgcgagacatactttgtgttatgccacattgcttaagagaatgacggtattgtttcatttgatagtgccaaccttgatcagaatgaatgaggagtttgtcttgatctgttacacgttcaaaggcttggtctaacattgttgaaacaagggaataggtcgttcttgaaccaattgtatacgtgataatttcaccattaaataaatctaacattggtgataggtataacttctccctaaataacttacactccgttatatctgtaattcatttttcatttggtttgtcggcttggaagttgcgatttaaaatattcggcgcaattttcccaactgtccctttgtaagagcgatattttttcatacgaacaaggcattttaaccctaattctttcataaggtgatacaccattttatgatttattttgtgtccacgattcatccgttcatcataaatagcttattacttgagctttgtcttgtttggtgattgtttcttgttttgaactacagcattaaacctttttaaatatacattttccgcttgtagtgtttctattgagccttctactactggttttatttttttatctttcatggatggacgcccctttttctttgaatgtagggcatacaatcctcctgtttcataagctatttttcatttccgaagtgtttcataagacggaatattggtaatgtctctataaagggataaaacattcttcttatgtgcccaatcaataaaataatgtcatacatacattagaaaaaacacacttggaggcgattctcatgtcaagaagaagattttttgatttacgcgaaggagatcgaattaaagtattctcagctggtatatttgagggcgaaggaatctttattcgcttcgctgaagaaaaggatgaagactttattttttgaattaaaaacaatagaaatgattgtgacagagaacggaaatgtgatcgtgaggattactaatattgttctataatttctcataagaaagcttaggaacagctgttaacaaatcatttacgaatacaattccttatccctgtatttaatgatgaaatgaaataaccattttgtcttactattttattggaactttaagtccatagatttatcctatagaaattattgtctacatgtagcacacttcttttgtaacccatcccctgaaacggtaagtttaagaattttctaacacctgaaatttttatctagaaactcttgattatcacctgttattatccggatatcttgtatggtaaaacctttttcaaatgagaatgaattttattccaattcctcttcttcttagtactgttacaaagtttttaaatatgaaaagctttaggttaacttgaaatgatttctcccatatttcatccgatttggatataaaaaaataaagagggtgtctcagagtaagaattttactactttaagacaccctctaatatccataattatatatcatttagttccgtcaatatgtttaagaattttctattaaatttatgatagaataaaatactaattgtacattcactcaaaccttaataaagtggtggaagattagttggcacaaacataatattcatgagatcaaatggagtaccggagtttaatgtcacatttatatctagcgttacattagtattatcacttgctactatattaccgatattaatatctgaaaaacgagctccattatcattaactccatcgttatttgtagtggtattaacatttgaaacagtataaactctaccgtttatagtaactcgaatagttgaatttcctattgaagatactcttaaataaagattgtaactatttccattccctctaagcgtataacgagctgtcgtgttgctttgttcaaatcttaaggaatcaccttgatttccaaatttttcagaaataaatgttcgagtttgattattcacttgagtggcatgtattggcgatatagtaaatcctgtataatcttctggcgccaaatggatcatagtaccattttcattagcggcatagatattattttttctgttatgcacagataccaaataggcccgtgctccaccaggtgttcccgaaggactttctatatttcttatttggttatagtgtaacggtcttgttagatcttcgtttctaataactaaaggaaccccagaaatattacggataaaataatctgggaaatagtttgaatttccacgggctgaaaaagcaccacaccttaaacttaaagttgtttgaaaggattctgtctgccaattcgtagaggtagcaacgccctctcgatctgtacctgaatccagccaacttctaacaaatggtgttgataaaggagggaggaccgtgctgcaattaaagttgtgattgagattagtcgcccctatgagaccagatgaaactcctccgctataattaaccctggcactattcaatgaatgagttgtagtactacccggtaaaccaccaatattagggaaggtaatagaaagcctagtaccactaataccagataatatataattcgaattaacttggaaaagagaatataaaaatggccagttttgtgctgtaaatgattgtgtctgctgtggtccactaccgctagcatataaattagcgccagaagataccataagactctgatatttaaacaatgaccaaatggatacatattcaaatacatttaaaaacatatatgttctaaattctaacatatcgtgtaaacgggtgtttaaccctctaaacgcagtttgatacgtatttatacaataattagaataatctcttgtataatttctcaggtaatctcgatacgtacgtaatgttgctgctgaaataccccattcatctgcattaagaataacatctctaataaaagaaagatgcatattggctgcctgtgcaaataaaggtaataataacaactggtatccttgtatctggaactggggtaatctatttagaaataattgctgcattgtattaaccgaagaagttattgataaaggaacagggttttgagtagggtttaaaaaattatctacttgttgattaaactcccttatattcgcttggagccctatcaattctgcatttacacgagcaagggtatctgtattaagtctttgatttaggaattgttctgtctcccttaaaatatcttgcattagatttgtactaccactaggaaatattatcccccataattcactcaatatcctttttccaataagactccccactttctttagcaaaaaactagacacagttccgactacaggagctacatataaactatgatctgttcttttccactccatccattctttttggatggtatctaatgatttatgttcaaaactaaatggatcatgggctactacattatacgcatcacaaatagttgttcttccactattcaatacattattcatataaaattcctccttaaatatctagttttatattaaaactaaactcttttgataataacgagtatgtttaagaaactacttactacttactacttacaaccacaatcacaattctgactttgattatacgtatcaattaaatcttgtgtgtatacattcaaatcttgtgggcatacattctgactttggttatacgtatcaactaaatcttgtgggcatacattctgactttgcatttcaattaatggaaaaccgtagagtttctatccttaagttgatgggcatggggttaattcactatgttaaagaaaatgatgtttatgttaatggctcttactctagtttttgtaccaactctcgcttcagctgcaactatagaggatggaaagaaatacaacgcaacacaggaggaattagaagctcaagttaaagaattagaatatattttttcggtacttatggtaaaggatgataaaacaggtaaatatgttcttaataaagaagaattagcgaaatcttcatataacaatgaagaaaaagcagctattatagctggtgtttatgtaatgaatgatgaagaaattccatctaatatgtactctagtaacgtttgggaaagatgttggcaggatgcattaggtattagtaaatcatattttaatcaaataaaatcgtatcttaagaaagaggattactggggagcattgggaatgctttcgttgcttgggctaccatataagcctgcgttgttatttgcttttgcagtaacttgcgggccagctccagcttatattgcacctaaccctcatgaataataagcctgatatcttataagtaaatgaactaaaattagaatctcttttgtaaatctattgatgcaaaagagattcttttatctttttaaagaagtatttctgttaaatatgaaaatattaagtatattctgttgaaaaaaagtagatttgaagtaagttaaactttcatatgatatgcttattctatactaactaattttcaggtgaggagttgatcggttattactagtatagagaatatatataatgtttctgtattcttaatgcttttatctactttttgtttttatctgtatttacgaaaaataaaaagagaaagaaagctcactggtttcgaatttacaatgtatatcataacacaagttagttacattctttggggaatctatattatttatataaactttggatgatattttttgttttatgaaaaaaaggctattaaaaaagggtttgagataaatatcaaacccttttgactatatataattatttcactgcttcttttaattcttttccagctttaaaagcaggtgcctttgaagcggcgatttgcatttcttcacctgtttgtgggttacgtcctgtacgtgcagatctttcacgtacttcaaatgtaccaaaaccaagaatctgtactttttctccatttgctagcgcatttgttattgtatctaaaacagcttgtgttgctgcagctgcatccttttgtgtaagttctgctttttctgctattacttttgttaattctgtcttattcattttttgcacctcttcatatgtaattaggtgactattataacgtgtgtatacttatgatgcaattaatattgtgcatagaaaaagccctagcaagagctaggggacaatttctgtgtggtagtaagaaagaaaaacatgttcatcgtacagtctaaattgtaacatctatattaaatgatgaaaagtacttattctagatgttctacttgtttccacatattctataatgaaaaatatccctctaattcatttcatcttagaaggatatttccaatctttttcttttcgagtatttagagcaggtttagatgaatttgtagaaagtgtttgcttttctattttatctaatctctcatctaatttttcaatagcttcttttgtttccttcagctctaatttaatttctgtcagcaaacggagtattgcatctccttttgtcattttcaacagtaatcgctcccttacttatattaaaagtgttactgtatatagttgaaatttcaattaaaatagaagtagctgcacctagtcatattgaatatccttttacttattcatagatatataatagcattgctatggaatttctagcaatatcaaaggaatagttccattggtttcactattatttctaatcagtgatgtattagccttaaaaagggaaaacgaaaagtcatgaatatagaaacaataaacgaaatgaaaaaataaatatatgagtccaggaagaaaagagcgttatattaaagattataatgcttccaaaaatgaactagaaaagataatgacttacgctaaatttagcttagaagctaaaaaaagagaaaacaaggtaaaagacgataaaggaatttagatatataattgtggtatgacatgcagaaagtagctagaaatataaaaaataaaaggtggtataaacatgaaatcaacaggtgttactagaaaaatagatgaattagggcgaattgttcttccgaaagagttaagaagaacgttaggaattgcagaaaaagatcctatagaaatattcgtagaagatgaaaagattattttacaaaaatataaatcttatgatgcttgtgcaataactggtgatatttcagaaaaaaatatatcattagcacatggtaaaattgttcttagtccagaaggcgctgaacttttaattaaggaaatccagcagcaattagttaaataagaatattcttcttagtacattacaaagaaaaagacatctatatagatgtctttttctttgacttaaaccaacataattttaaaaacactacttttacaatggcaaatatattaacaatacttcatatcacattcattttagcacaaataacatcacgtattctatatatataaatataattcaaggaaaatacataattcctttttaacaattcactgtacttagatgctattgtagagtgtatcatacatagttaataaaaatggtatgatgggaataaagaactatcggaggtattgttgctgctattcaatctccctgtagaaagtagacagcacgcttagaaatatgagtgtaatatgaactataattttttcaaaacattacgacaaggttatggttcttttttacggaaaacttttcctgtgagttgaaaggaattattataatcaaactattttttaatagaatgatacctaatttgaaattaattttagtgattgacacaataatccctagaatgctacggttttaatggtaaagtaataagaggtttaatgtatagagatattacgtatatgatgctaaaaaacgcctgaatactattagtgacagggaatctatattcgcatatcccctaaaattagatatacagataatttgattaattaaaccgtacatatagagaggaagaaagtaagatgtttaaaaaagttacatcggttgtagcttctattataggagccagcctgctactaacagcttgtagtagtgaagagaaagagactaaaaatacagcaaaggcaactgacaagaatgaaacaaaacaatccattaatttaccgtatatagcggagatcccaacaatggatgtaacaaaggcaaccgatagtgaatcaatgaatgtaatgcggaatgtgtttgaaggtctgtatacactaggaaaagataacaaagtaattcctggtgtggcaaaatcgtatgaagtgagtgaagataaaaaaacatacacattccatctaaaagattccaaatggtcaaatggaacacctgtaacagctgcagactttgtattctcctggaaacgtgctgtgaaccctaatacagctgcggaatatgcatttctattctttgatataaagaatgcaaagcgaattaatagtaaagagctacctgtagatcagctaggggtaaaaacaattgatgataaaacatttgaggtgcaattagagcagcctgtcccttatttcattgatttaacaacgtttgcaacatttttacctattaacgagaagtattttgaatcacaaggaaagcagtatggtttagaagcaaagcaattggtctataacggcgcatttacattggataattggaagcacgaacaaggttttcagttgaaaaaaaatccgaattattgggatactaaaacagtgaaattagacgaaattaactttgatattgtgaaagataagtcaacagaaattaatttatatgaagcaggtcaaattgaccgtgtaggactaacaggtgagtttgtagataaatatagaaatagttctgatttcaaagagcgacctgaagtaactatgcagtttttacgtatgaatcaaaaaaatgaagtattaaaaaataaacatgtccgtttggcaattagtcaggcaatgaataagaaagcctttgtagatacagtgttaaataatggctctcttcctgcagatggttttatacccgctgagtttgctaaaggatcggatggaaaagacttcaggaaagagaatggagcattagtaaaagatgatgtgaaggcagccaaggaaaactggaagaaggcaaaacaagaacttgggaaagaacaagtaacactcgaattgctcacgagtgataatgcaatagccaagaaaaatgcggagtatttgaaaggtgaactagaaaagaatttagaggggctaacggtctatgttaaaccacagccacgcaaacagcaaattcagttgcttctaaatagtgattatgatttaggtgttgatgtatggggaccagatattcctgattcgattacatttttagatttgtttacgacagatagtacatataactttgataagtattccaataaacaatatgatgaactaattcatcaagtgaaaacagacttagctggtgatgaaaatgctcgttgggagacaatgaaacgagcagagaaaatattattagaagatggagcagtcgcaccattttatcaaccaggtagatcgtatttacagcgttcttctataaaaggtattgtgacgaatgattttggtggggaatttaactataaatgggctgaagtgaaaaaataagcgaaaaaaaggaatcgaattaattcgattccttttagtttgcatagtaattatgcacaattacatatttaattatcttgttatatcgacaaaaatcgacatttttttcaatacgattatattagaatcgaatataacgatattggatgttacaaatatactgagggatattagggaattcttgtttttttagaagggaaaatattatgaatgaagcacttaagagagaagataaagtttcagaaaaaacattaaacaaattcttgagtaaaattattgatgaaattgatttccaaaggaaaaatcaagaggatatcgctaaaataattggcatttcttcaggaacgctttcgaagaatttaacagggaaaaatcaatttggattttggaatttaattagattattgaagctattgtatgcgggtgatattaataaacaaagaaagatgttacacaccttctgttctgtcacaacaagcaagaagaacttgaggattgccatggaatatgcaaattcaaaaggtgatttatcacttcttaagcaagtagtggatcaagaaagcaagtcttcactcgcaatgaatagagaatgggcctatgtatatgaactagtatggcttagaaatagtggcagtattaaaaagcaagaattgttagctaaactggaagatcgtaagggtaaaaaagtaattaagacaaaagagatgaaggttttatacggcatattaacttactatactatgtatgatttagaaaaatataattctttattcgagtatgctgaggtattatcaccagacgttaatgcgataactgatagttttattagaacatcttatttaggtaggattaaagaaggtttagcatatgcgtacctggtgcaagatgatctcgaaaagtctaggcgtttatgtcaggagattctagatttagaagatcctgaagggtgttttcatcttttaagagcatcggcacttgtatatttagcagagtcttataccttcgaatgctatgagcgtgcatccaggtatataaataaatctctagaacaattagagccatgtaattttgaaagggaacttcaaagaaagcagtcgattcttaatacatatgcttttattaagctagttaataggaaagagttggagaatataaaaatatatcatcctgctgaagaatcatttttagagattgttaaggggaactatcaaaatgcaattgatattcttaataaactagagaagaagaatagatttttaagtccaatgcaatattgtattttaggtatagcaaagaatgatattactttaattgaaaagtcaattgcgctatatgagtgtgttggtaataggttctacagcaaattccctaaaaaaatagtagtagaatttaataaaaatggtataatatatgagggtggtgctatatgaagaaattattatttgtagtaacaagtattattttggcagcaggaattatttatactgctggtagtaaagagcaaccaaacaatttagttgaaaaagattcagaaaatttattagctagaatgggagatcccggtggtggaatgggttaacctttaaataattagaatgcgattgtctcataggaggcaatcgcattcgttgtttttagggatatttcctaaatatcaaattcgaaatacaagaaaagtttgtgaatcattcacaaactgatagctgatacgaaatcaaatttttaaactatattgttagtaaggttgcaaaaacccttgtgttatcaaatctactgataacacaagggtttccaaagattattccgcgagggcggggcactgaaaatgcgtagcccctttatacaggctaatattaagcaagtgcatttaactcacgtatcataaaaaaatactgaaaaataattttacattcatttggcaaaatgcttttttatgaagtaggtgtagtcaataagaacctctaacacttcttgctgtttttgtggaggcaaatcggatattgctactttaattaattctaatttactttcgaggggtgcatttcgcccgaatagttcatctatggagacattatgtatttcagcaagattcatgatggaatctgcatcaggatcagctttcccatattcccaatttgcataagtagtgcgggcaatgtttaggcgatgtgatatatcggattgggtatatccttgtttttttctcaattcagcaagtcgtttgcttagatgggacatatcatcaccttttcctttctgatttataaagttagtgtaaaacagaaaaggtaaattgtgtcctaatgactaataataagtcatattttaaattaatttgtaataattagtttaaatgttatgatgatagagaaatatttagagttctatgagcaaaaaaaacaggaagaaatcgaaacattaaatcgagtttcttcctattatatatactaactaaaataatgaatttcctatatctattgtggccaagttttgacgtcttgtacgctctcttaaataacgttctgtagtcatgatagattcatgccctaaatagtcccttattttttttagttcaatacccttttccattaagtaattagccatgaaatgcctacaagtgtgaggagtgattctatcctgtcggtaacgcagaaaatctaaatttatttcttctatttttttggccacaagagaagagagatagtccgctcgataatttgatccatcagctttagggagaaaagcagaagtactcgatgtgtctagttctgttgtttgtttacgtaaacttcgaacatggcataaagcatccaatgtatcttcaaagatgcgaacttccctacttttattccctttaccaactacacgaagtagataggcatttaaagatgaatgaaagaccaaatctgcccatttagcagttgcgatttcttcaattcgtagtcctgttgtagttaacaggaaaaatgcagtgtaaacaaaatagttggatttttttagttcatctaagatctggttaacttcttctggataaaggtcacgattgaccagctcttctttttttacggatacttttttaaggcgactactaaagttgtctgagagtccgttgttatcgtacacatattttaaaaactgctgaactattgttttctttttacgtaatgtagtggcagcatatttcttacttaattcatagaagtagatttccatctcattatgggataattcctggatggttccaattgattcttttatgtaacgaagaaaatgagaaagatcgtgcagatactgttgtttggttcgctcacttctttttttcgttaaagatggctcatcgtgtaaaaatagataaaccaatgattcttcgcttaattgcgaatagtcaatattacggatacctaaacccataatgttttcaaaatgagagctatcaaaaaaatctgattttgattttacaatttggttattatgttcgtaatttataatattcaaatttaaacacaaccttttatagaatgaaatagtaaacaaatgttttcatatatatttttatgattctaattataccacaataaacagattatttaccgtggtataaacttaaatgattaaaataatatttttaccttaaaatttaatgtttctgtttagaagatatataatggaaatgttaaactcgtttttttgtacatttcaatccaaatgcggtaggaggagatttttttgactcatcttcgtcgaaaaattttacaagaaatccataatttagaagatacacattgttcaatttgccctctgaacaatctatcagtgaattgtacagatgagcaagaacaggcaaaacaaagaaactacaaacattgcaaaggttgtcccattttcgattccatccgagagaaaggagatcaattgaattctttgtcgaaaaagagtacatttaataaggtacgagaacgttatatggaaaatccatttaaatatctgcagtataaggagtactcaatcaaagatgtagtaaaagaaacaggtttaacaaagtatcaactaagaaaatttaaagaacagctagaatgaaagtttcggatgaggtgagatatgagctatttatctttagaagaggtatgcgatcgggtaggtttaacaaaaaatcaattaggttatttaattaagtataaacacatcgaacctatcaatctagatacctggaaagcagatgggggatattgctttgaaaaagaggatgtaaaaaagctagaggaattatacaaagattgtttaacattaaaagaagctgctgaatttctaaacaaatctaagacatacgttcataatgcagcaaaagatgggatattgccttttaaagagattgctaaagggaaatctactgaacgattatacttaaaatcggatttggagattttcaaagaaagaattgaaaatagatcaaaagaggagtcgaaagaaaaaaagcagcatttaagtttataccttgatgaaaaggtattagaagcaataaagaaaaaggccgaaaagaaagggtataatggctacaagaagtttgctgaagacattttaaccgcagaagtaaaagaagacatagaagaatagaaattccagagagaatagacccctaaaaaaacaaaaaacgttataaggggtctatttttgtttttaataaatttataaaccatcaggtctaattgcattgcctgaaacgccaatgacgtttacaagcgaatttgagaggtcgttttttttttttttgttcagtcaaaattgctgttattacaaaaaaaggaactgattataagagaaaaagtttcacaatctataatattgatatttttggaaaataaggtattgtttacttaatagtatgagaggcgttcaatagaagaaagtaatttgatataaaacatagaaaatacattacgaaaaagaaaactttaaatttacatatttatattatagtaaactaactaatatttgatattagtctacatactaagaaacttctttttcaaatttaaagctttaaagctactatcaaaattaaaagggttaatttaataatatcctaatacagtaggggttatggtataatgtagatagtaactgaagacgtgcggtgggaggttgcaccctttctttctcttaattaaagagggaaaggaggtgtaaccgatatggattttttacttcaattattacaagatgctacgaagctattcattacagtattcgtaacaacttatgcaactgcttatgcaaataagttagttaaaagtaataataaacgtaaaagaaccaccgcgtccggcaagacaaaaggtggttcaaaaagaaaataactaaaaacttgcaaccaaccaccttacagcggcagttacatattggacgggatgtttccagcatcctgtctttttagtttatgcaattaagttaagtgctatactttatatacattaaatatgcattcaatatatatctaatctacagtaaacataccatatatttattttttggtcaataaacaagcaatcatgatttcattcaaagtatatgtggagtaaattacaaaagcctaattctattcacagtatactaaaataatgagataagtctcccttattttagtatactgtgaatagaaagaaaattcagaaccgatatagcgatgtttatagtatagaattcattagaaatttatacatcatgtaaaaagtacacatttacgaatcatgtctgtaccccatgcccatcaacttaaggatagaaactctacggttttccattaattgaaatgtttcagcaacactctcacttcacgtctaaacgcttatagagaaacgtgtcgcgcccaaagattgcatcgggtttgctaagcgctcataaaaagaacgatgtgtaaaataacgaaacactaaataacttcccataaagaaagcccctagaaacattgcatataacgccgttgtaatatgattatgcccatcaaaccaatatacgagaaatatagctagtagttgaattatagtaaagcaaataagtggtatatgatcacgtataaacaaccttatcatttttctataccagtatcccaagtaatatgcaatctatatccaacactacgaatcgtttcaatcgcaccttctatatgtaacgtttgtaactttttacgcacacgtgttgtatttacacttaatgtattatcatcaacataagattcactatcccataatttattaagtaacacttctctactcacaacacgcggataatttttcattaatgtctctaataaaatagcttcgtttctcgttatatcaatctcttcatttctaagtttcaatacaagtctttcaggatataaacaaaggccttgttgctcaatcattcgctcttctagtttcggtgcataatctccatatgcacgtcttaaatgactacgaattttcgccactacaacttcataatgaaaaggcttcggaataaaatcatcgccaccattttctaacgccataacttgatccatcgtgccttcacgggccgaaatgaatagtatcggacatgtagaaactccgcgaatttgacgacaccaaaagtacccatcaaaactcggtaaattaatatctaataaaactaactctggttgttcttctaaaaaaatgtttaatacattttgaaagtccgatacaataactccttgataaccatatttcccaacatgtgtcgataatagttctgcaattttcatatcgtcttctacaatcataattttgaccattattgaactcctttttaatccacaatctcaaatatacttatataaaataaatactacctcttttcacaaaatccgtaaattaaaaaaggatgcttttatacaaaagtatcctttttcgtcccttatctatttaatatgaaatttactaaaagtaaatcctagtttctccacataatccatccctaattccatacgcgccgttttcaacggatccacaacttggcaaacttttaaattacctgctgccgataataaaagcgttgcatcagctttagacattgctaattcttcatgtaaaaatgtcaccatattacgtacagcacgatttgctgcatcatctagcaatttttctgaagcaatcgtcattactttttctttttgaatagccattggtagtggccattttttcccttttataatttgaactgttacagttacctcaccagcaacctctactccactaaccccaatttcaccatcccccattgctgcgtgtaaatcacctaacgctaatagtgctcctgggacattaactggtagtagtaatgttgttccttctttaatttctttacagtccatattcccgccgtgatcatgcggtgtgccacatgaaatgctctcttctttcggtgcaataccaattaccccaatcattggattaatcgggatttgtagttcacttgaaaacaaaacatgttcattatgtattgggacaattttcactgtattttcatttaactcattccctattacaccaaggtttgcacctgtagttaaaacgccctgctctgcaattttaatcttttcaatcgttacggctaatatatcgccaggttctgctcctttaacatatacaggtccagtcgctggattaattcggttccaatctaattcttgaaacacaacatcttcagaatcgatttgattttcaaagcaatcatatgtttcaaatacaagactgctcccaatttccacttccatacaaggtttattttctggtgacattgagtaaatgatatggtctttatgaattcgatacataatacctctcccttttatatttatctactattactaattagctctttttatacaagctcctcttaaaattaaatgttatttttatgtaaaaaagcacgcagattgttttataacatacactctttactataacagaaaggtggtatcactatgccccttattccatacaacgaaagtgatgttgatttactagctcgtttaattcgtgctgaagctgaaggcgaaggtcgccaaggtgaggagttagttggatgcgttgtagtaaaccgtgtattttgtgattgcttagattttaaacaactccgtaccgtacgcgacgctgtatatcaaagccccggcggatttgaagcagtacaatatggatatttttatcaacgcgctcgtgaatcagaaaaagaaattgcacgaaaagttttacaaggtgaatggcgctggcctgcacgatgggctctttggtatttccgtccagttggagcttgtccacctgaatggtataatcagccatttgtaggacagtttaaaagccattgtttttatgaaccgagtggtgatgaatgtccaaaaatgtattcacgctagcaaaatttgaaacgcaagtacttagaggtctaagtacttgcgtttcttttagctttattttagaaatctagtaatgagatgaatttttcgatgcccaccacatgtattaataacgatatacgtgggccactagactgattcataatgagcttataaataataataaataattgtttttgattttctttcattatttttttattgtcatgatggcaaatcgaatacaattgctccattaagttagagtaatctttgttagaacgaagtatattgcaaacttttactaaccattctttctgtctttcatctaatgtgttgtaaaactctgtatttctctctcgatttaccgcaattaatttttcagattgaaagttttttatccaatactctgcgcggttacatatcgctatcatagcatctaatgtataacttctatctattttttctaatgtatcttgtaaaatagatgaatcaaaatttaatagcggtaacgttcctgctacttgattaaatctcggatattctttaaactgcctatcaactttagagagtttaattgcatcaaataaatcttcatttttgagcgttttattttcatagctatctttcaatcgttcatactctgtataattacgaatcacatcttcatccaacccaatatgaaaagcagcgcctggtttgtatttggcaaacataaagagaattacttctggtatatacactttcaataaatcgcttggtgtaatgctattccctgaagaactagacattttttcatgattccctttaataccaatgaaatcgtaagcaacgtaatgaggcgcttcacgattgaatattttccttgcaatttcttttgatacattataactacccgtttctgatgagtgatctcttccacccggttcaaaaataacatcctctatcatccatctcatcggccaatcgattttccagtttagtttcattttatttgtatttaatacggataattctttttcatttccgcattcacattcataccggactgtttttaatacttcatcaaaatgtgtaatagttgttgtatcttttccacacctctcacaatataatgtagctggataaaaattgtttcgctcttcttcactacactctccagttttaaaatccattaaaatatcatatatttcttttcgtttatacaaagcctctaaaatatttttgttataccttccacttctatattcatcatgttgataaataaattctacttcaattccaaatgcttgaagcgatgtttcaaactctttttcaaaatgctccgcatacgagttatgacatccatacggatctggaatatcacagtatggcataccaatatactttgcaaaagatggatcaatattttttggaacttttctaaatcgatcataatcatcccacgaaaatataaaacgagtctttttccctaaaccttgaagtgctcttactacgaaataagtcgttacgatttcacgaaagttcccaatatgaacagaacctgaaggactaattccagatgcacaaacaaacgtttctttatttggatgtttcctaattaattcatgtgctacttcatacgcccaatgcatttattgctcacctcaattattttttgttttcgtattctcagttttatgcaataaaaaaactcccacccccaagattattcatcttgaggacgagagttgttagcttcgcggtaccacctcagtttgttaatatgtcaccatattaacctcttcaggtacggcaaaatatgcttataccctatctctataacgggagaacccgtcgcaccatccctaaataaattagttccttgcgcagctccaagtcttttttcgttaagatgtataccgctctttctcagctaccagagctctctgtacgtattctttcttaactactcttctcttccatgccattttaaatattagttttttaatatgataatttataacacttttattgtcaaacttttccgaatcaaaaacatataattacctaaaaaaaattctttatcgcttctaattgaattttgtgactacactcatcacaacaatataccccttttggtttttctttaaatcgcttatatttttcactgccttcgtaaacacgaaatatattcttacaagaaaagcaaacaatctcataaaacatcatatgcattttcctctccttgtttatacacttttttaatcacttgtgagaaggtcatttttctacagcataaattttaatatcctttgactaaaaggtttacctctattcttatcgaattatattaatatcttataacgcgaggtgaacatcttgttcagtaatatagaattagttttagatgctaaagcaagtttagctgaaggaccatgttggaatgaaaaaaagcaacttttatattgggttgatattatggagagaaaattatgcatatacaatcctaccgctaatacgaaccgagtaatttcactcaatcaacaaatcggctgtgttgttccatatttagaggatgtactactcttagctatggaaaaaggcttttattctattaatataaataccgaaaaactgacacatatttttgaccctgaaccacatttaatagaaaatcgtttcaatgatggaaaatgtgatccagctggtcgtttctgggcaggttctacagatacatacggtatgaatactgcaggttccttgtattgtttacatcataatttaagtgtagagaaaaaagtttcacatgtaaatacatcaaatggaattgcttggtcacctgatcatacatacttttactttatagatacacctactaaaaaagtggttcgctatcaatataatatacgtactggagacattcataatccaattgatgtaatcattttctctgaaaatgatggtctacctgatggtatgacaattgacgaagacggctgtttatggattgcacattggggaggttcaaaaataactagatggaatccctctactggagaaaaaatattaagcattccaattccagctttatatgtaacatcatgtacatttggaggacctaatttaacagatttatatatcacaacagccagaacaagaatgactgatgacgaattaaaagagtatccacatgctggtggtatttttcgaattcaaacaaatgttaaaggctgtcccacctattcattttgcaataaaaatattggagctgaaacaatgtgaaccgtatcgattacataagacaagaagaaaagaaatatcacggcctttgctatgaacaatataaactatttgaaattggctcttggctgtacaaaccggttaaaacagttatggacttgatgggtcactttgaaggacaaaacaacttgcaagtacttgatcttggctctggcatcggtagaaatagcattccaattgcacaaaagataagaaatactagcagcactgttacatgtgttgagttacttaattccgctttaacaaagctacaaacttatagcaaagaacatgatgtattcgaggttataaaaacagaacaagcagcaattgaaaactatcatattgactctaacgcttatgattatatcgttgcagtatccagtttagaacatatcaaatcagaagaagattttaaaaacgtacttcattctatgaaaaaagtgacaaaaaacggcggtattaattgtttgattattaactctaacatacaagaaattgatttaaaaacgaatgaagaattagaagctttaattgaaattaatctctcaaccgaagaactgatacgtctattaaaaaacatttataaaggatggaaagaagtaaaagttgaaataaaagaattagcttataatatagttcgtaatgaaagacacattcaattaaaaacaaatgctattacttttgcctttcagaaataatactataaaaggtaaggatattttctcatatattcataggaacacccttaccttttatcttcataatattatttcgttattagttttcgtatcatctaaaatataattttcattcgaaatactaatcagctattaattgaattcattaactggaagaaatattccgcttcatgagtctcattcagtttataccatgaatgaagtgtatccggcgcaaatacatctaattttctcaatacctccatggcaaattctagaggagctacacccgatgcggtaataaagttttcactggatgatacaggtccctctttataaaaattttctcctttataagtaggacaaaccattttcatatactctaaactattgcttgtgtgatttatagaatccaagtaaccgtaatttgcaagacctatagttgcaccgcaaatggcagccacaattgtaccaagttttaaagcctcatcaactttttgcaaaataggtttatgtatttcttcactccaagtattccctccaggtaaaattaatagatcgttactctcaaggatacattcatctagggaaatatccggctgtatattcaagccccccattgaaataaccatttctttatttattccaactgtgactactttaaaaggcgctacatcttttttaaaatatctccctgtattaagttcagcaattaaatgtccgtactcccaatccgacatcgtgtcaaatacatatagataggcttttcttgtttgcattcaataacactccattcatatactacagttttaattacaaaaattgctcttttcattttaacattttattcaatatttatggtttaaaattccaaataaaagagcacttgtttccgcaagtgctctttttggggattttgagatatcctattaaagaaagttaaggttacttaaagttaataggtacttctattatatgcttgtcctttttatttgtgcataatcaatatataaatatctttaataattcttaataacttttaattatagttctctcttacattttatcgttaaaaaattggctttttctcacgagaaattatctttttatattgtacctatctaatactttttctaacatttctaaagttattggttctgcttcttttattaatcgataaccaatacgcccattcggttccgctgtaacttgctgtaaactctttacatcatggatccctttttctcttaattgcatatatagttgttgctccgacatttttgcctgcatcaaattctcttttacaatctctccgttttcaacaattataatgctacttccatttagaaattgttccaccttctttgatttcaattcaaagaaatgaataataagtagtatgcttgcaaatatgatggccgcaaatatagatgggactacttttctacttaatacaggttctacaataatacggccgattgatacaactataatgatttcagctcttgtcatttggctgacagatgcactacctgtcattttcaagacaattattccagtaaaagttaatataatactttcccaaattatattcataataacccaatcctttaatggtgtattttactatcattcccattaaagttgtgttttacttacctattaagttgttaaatccttcagaccatgatggaaataaaggtatccaaccatactctttacgtgccttattattggaagctcctctttcccaactatttttcccatcttgaactttaggcttaggtgcccctatcgctgctgcatatattggtaaccattctttactagttgctggataattatctacaatatttacgattcctgaaggccaattaagggctagcatagtagctcttgcagcatcttcgacatgtataaacgagcttatcccgtctgatgcgataatctcattattacgaacttgatttgctattaatccgttttccgcataccatgttcctggtccatataatgtgccataacgaagtataaccgattcaggtaactcagtaacagcttcttctaattttaatatgccattaacagtgacttgccgaggcgcggaagcagtaatatgtagtgaatctttttcagtcgtaaatgtatcccctggttcatacgcccatgaaatactttgagcgattattttctgtacccctacatttttagctgcatcgacaaggttacgagtgccttttgttctaatttttgcattatcctcaaaattccatgatgacaatgacgttaattgatgaataactacatcgggatttgtttcttctaatacagaaaatacagcctctctattaaatacatcagctattactggtatggcaccaacctttttcattgcttctacttgcgaagtattacggatcatcgcaaacaccgtgtgcccattttttattaacagtggtaataaagaacgtcctattacaccagttgcacctgctacaaatattttcatatatgttcctcctcatttagtaatcataaatgtgacgaaacatttgtgaggtatgtgacaattatttaatctgtgtattcattttcatgtaaatgtgaattaaaatcccaatatccctggaggtgacaaggatttatgaatattcatatttatacacttacgcaatacagagctacactatatattaattaaacactaataaaacctatttttttctcagaacctcctcatttgtacactctttttttattttcaattaacgtttaaataaaaaaacgtataatccgcatcattgccaattttcatatattaaatgcctacttcatacagtaataaataatgataaaagaaaacagagggtggttgtatatgacaatgacggatatttataactttatgattaaacatggacgtatgccacacttccacgatgaatttccgttaattttattctggagccaaaaaagtggctgcacttcactagcaaattggttcttttatcaaattggattatatgaagaagcgattaattacgatccgtttattcataactacgagtatgatatatacaaaaattcttttttttactatatacaagtagctacagaattaaggcttaaacaaaaacacgcgtacaaacttgttagaaacccttataaacgagctgtcagttctttcttatcactcctttcaccaccccatatagaacatccggaatggagacctattcgtcaatttctgtacagggatgagaattgtaataagaaaatctcctttaaactttatctatattatttaaaatcttttgattctaattcagacataataaacccgcactatgctccacaatatatacaaaatgaagaacgttttgtaactaattatatctacctagaaaactattctaaggaaatcgcgaaactagaagatcaatatggattaaaaaaatctcctttagatttattggaaaaatcatggcaccatcagaacgactatgctatttttaaaggggactacgcagacgctaacataatagaccccttatttccacggctcccaacatatgatagtttttatgacgccgaaactactcaattagttgaagacatatttaaaacagattttaccatatacaaatacccctttacgccactttaaaatatataatttcttgaatttatatattcagaatatacatgctaattaaatgggatggagcacatataaaaatgtgctcttttatcaaggatttattaaaatctcatattacaaccaacatagtgaatccgaatattatatatttaatgcagaatcttaaagcttttccttataatgagtaaactaaaagaatctcaatcggtcattctaactagccaaccatcagtcttaaatacaaacttatctctgcccttctcaataagtatattattggggtagagacacatgcccatcaacttaaggatagaaactctacggttttccattaattgaaatgaagattttgtacatgcttaaacaagcgaaaatgtacatgtttatcttgacatttacattccagatttacaatgctataagttttatttaacttcatccatagcaagtagtatggaactgatatatgcgtttcagaactaaataattttcgcattataatatcacctctaaaggtttgttaatttatacattcctcttactaaccatctgtatctcttcaaagatacaaagtaacatttcaattcgtttgattgctggaaagtatgtgtcatcatcatagaaaagatagattttttcctcttcagcttggtaaagcatacgtatatcaaactgattttggattgaacgaaagaaactttgatcctttatatttatattggaaaatatctcaccaattggactccatgcattatcaacaatgttgtttaattcatccatggatatatgaaatagattcgaatatttgattagagtatctttatcgtcgctatctacctcttcgtgatgtaatttcatatcttgaattaagtcatcaccccagcttttaaatgaatcctcacaatcgtattcttcgaaattatcttgttctaaatacgtcgggaaataagctgatacgggaattcctaatctatacatacgcataaataactccataagatacaattgcgatgtatagaagcaggaaagatcagtatctaaagagttttccgcaagcataattatttcaagtaaagttttcgaatcaattaaatcaattgggaaattggagtcttcctctaaataagaaacggcagccattacttgttgaatggattgttctgaaatcttgctgaagtctatttctcttgagtgctctaaacaatctaatatgtagatttcttcttcatgtttcttatctgcaagtaagtcatgcagtaagtgagcatccttttgtatttttaacgaaagtagatactttcttactttctggtgattgtatgtaaataataatttcatacctggttccccttcgtcttttctcgaatcattgccgcaagacggattataatttcataataagaaagtacccattcatcaaatgagtactgttcataaccatcctctagaaattcaatcaaaatatggctgggatacgcttcactttgataggtgttaaaagaaaattcatgtaacacgaattgaaaatcagattgtgttatatgttccgagcctatacataaatagtaaccagctgtatcgaagtaacatccttccgcagccatagaactaatatccgaagcgaaattcgaatacatgtcttctgagctaaataacgtcccatctaacaggtcttcttcagttccaaaggcaaagtgacaaaatatacgtgtttgctcattaaaacgcgcaagcgattcgaataatagttcacttgtgatatgcaacttgtccctgtgaaaatcattgatattgattaagaatgggatgttatatttgcgaattaatttttgtatgcgtagtatccgaatgtatactttcatctcatttccttgattaaataaatatttcatcttctagcccctgcttttctacatcttctagttgttcagtgaaaagatgtaaatgtagcatttcttttaattcacaatctggaccatttatacgaaatgaattaccactataaaacgtgacataatgtcgtagctgctcaaattgcttttcaaattcatctatatgttctaatggtatgttttctaaatcaggcatttcattcgcaataaatccatttataatcgattcaaaggattgacgaagttcttgattattaagaaggacttcttttgactgtaataagtcaaagaagtcactgtgattcatactcatttggatgcccccttacacacgaaccggtagaattaactgcagattagagttagttttgtcatctgctcccactatcacaataggtctctggttattaattatttttatcgtgattgcttcagacggtattgtctgtagtgcttgtagcagatattccacattacaagcaaacgtaaatgtctcttcttgatcgcatggaatttccacactcgcagttcctacttgtgagttttttggttcaattcttaaagattttgttccttctgaagtaaacattactaatgtcgagaatgccgacagctgttctaatgtattttgtaactcgctacgttctacagttacatagatatctgagtaatcgggtatcatccttgatgtatcaggatatattccggctaataatcgagattgatagataatgctctcccctcttataagaagttgcgtgtcactaatcaatttcatttctaatttagattctctattaaatagttttaacgccgttttaagggatttacttggtaagatgacttcaccatctttagcagcaggaatatgcgtacgttcaaaacgtaacctcgctaaacgatacgaatcagtagcagtacatgatagctcaccttccatggattttaaatttaaacccgttaaaatctttcgtgtatctgatactgcaatagcatgtaaggttctactagcaatttttgcaaattgctcttgtgtcatcgttatccagtcttctcctgattcgattttaatttcaggatattcttcatgatccatggtacaaaagctaaattgtttcttcgtattttctacgattttcagctcattgtttgtatgctctaaaccgatgaattcacttttgaatttcttaatcgttttaagaaccggagcggccgcaaaaagcaccttccccggttcagtacaatccccactgtttacgttaaagcgtgtcactaatgttaccgtctctgtaccgtctgaacccattagaatcattccttttgaattacactctaataaaacaccttgtaatgctggcattgggcttttaatgtctacagtagcgctagctttctctaatttttcaataaataaagtacggttaattttaaaattcatagtaaatccctccaaaaaagtaataaaaaaagaacagacctcatatcctgttcattcgtcttcctgctataaaacaaagctttacgcgctttgttgtttttttaactgttctatgagttggtgaatggcttctgtatgatcatgaagtaaccactctctaaaggacgtaatatcgccggatatataggtagataaccagcggctaagctgtttttcattcccatggctaatatttatggcctcatgaatccactgcaaacgagttataatatcctctaatccaccagtcgttgtatcttcgaatgttctagcctgtgcattatgattgtgattataggcaagcaaaacatccctagatgtaattcctaacggtttaactagctgttgcatgtctcgaattaataaccctagacttggttgggcatttgatggttctttctgtgaacaaccttgtttattcttttgctgtaacatggtaggtggtgtgaaataataccctttcttttgataagaaacatagatatcatttttacccttactatgtgtagtaagctctactttatgtggttttatattatataaatatcttcccacgccccaaaggactgctgccctttttaagctattggaaaatccaccttttacagcattgtaatcagattcttcactgccatcctcttttgatatccaacgttcattcaaaaacactgaaatggtacatttcgttgctttctcaccccatttttcataagacacttgccatttatcaataccaaagacttcatcaaatcggtcctgaatggcgcgtgcgtcaacaaatggagctacatacgcgaaaaaacgcccgttgctttcgaatgtatgtgtaatcttccaacctaattgttcaaatggaaattcggcttgtaaactttccatattcgtcataataatccccctacattaattggtatttcgaatctgggtgaatcctctctttctttcgaaattcatcaatcatttcacaaataatccctctattttcatgaagcagccaatcctcataggaagtaatattctttcccgattgaatggataagcgctgattcaacacttctatacttgtatgactgatattccttgctgcgtaaatgagacttaagcttactttcaagtcccttaaatcagaaatagtaatatctttaaatgtcgtagctttcgtattgaagtttttattgtgcgcttgcagcattgatacagaactgatccataaagggttagctagttctttaatttcttcaataatgtcatgtaaatgagcatcattttgcaattttctttgtgattttttcatgatgtttccccctaagtaataaaataattgcctaaagtgctggctatacaataactccaaacttgaagacaacacaaaaagggcttcttcaagtcgattaaaaatgtgcatagcaaaataagctatatatacactaatcggctcaaagaagccctttcataaatgaaacaagacgcaacttgcttctacaactcaaccacaacacaaaaaaggtgtgggaataaacggaatcaattaaacaataaatatagttatatattaatctatttttatatcatattcaattgtttttaagcaaacaaaaataagaaggaaaattatatgtagtggttttatgtaccatataataatacctctgtttctacgtttataactcccttcttattttcagttcttggcgttacttcatgtactgcaattcaaaataaagtttttctggcttttgcttctggtctaaataacaaagtatttctggaatggtttgttcgtctacttccatactttccatataggacatactttcactttcttgaacatttttaaaaatagaagtaggtagtttttctgcagcaaacacactcattttgcttcctaacttttgttcggatgcagcgttgtagaaaatttcgttcacaatgacctcattatcatctggatcatacatgtaccctcgttgtatacgtagcaatgctttacccctttcaaatatattccttcacacaaatggttatatttgtatatattgttattttgtataaaggtgtcaaagaatattatttcgtaaaatccttaatttgtataggggcagatataggataattaactttagcatattatttttgagtatttcattccttttaaatctacaaaaaagatacttaaagaaaatctttttgattataaatgccattaaaattatttgaattatgcaccctgagatttctaatatctccctgaataaaggtaaaaaagccaaccttaagtgcttataaggatggcttagtttgttgtaaataactttgtatttaattgcttaatctccccttctgcaagaggctgatagaatgcatgttgtaatccttgtacatgtaaggtctcccctatacataataaaactctaccaggaattaaatctaataacagttctttattaatacgctgtgcttgctgaatagtagaaacataaacaactaaaattgtagggttattccccaaccccctcatgataatatctttacctgactctacgaaatctttccatctagcaataatctttttcaagcgatcctttttatctgttaatagggtggagtagacaacaaaattaaactcttgatttactcccacttgcactgaaaaacttaaaggaggggtaaaaacccctttactaatggatggatgcataatatgccctaaaaaggatggagcatagcgtagatggcaaagcagatctatatcatgccaataacgtaggtgaacatatttaccgtgattatcaattcgctctggagcaaagaaaaacatatttccttgccagtattttaatagcttataaccattatcggataacgtatatgtttcttcaaagatctccatatcaaaattctcaacttgccatttttcaattagacgatagtaaagtaatccttgaagtgcatcatttattttcttacgtgaatatctatccttgaataaatataataaatgattaaatcgaacggatgtatgaacaccaatgaaagcaagtatggcatactgttcttctgttaaacgctgcttaaacttaaccaattcgtcaaaagaatggaatacatacgatttatccagttcatgtattcgatatatttgaagtccctgtacatcctcacttgataaatgaggaatagaagggacataagtagacaattgtttctctattgtacacatagtcatccattaaaattggaaaattgacgaattagattttttactttgtccctgcggataatttaggatacgcactgttccttttctatttttggcgtcgatattaagcagctcacatgtaacaatcgtttgattttttgcatcttctatagttggattggcaagattacggctcttaagtcctttaaactgaatacctggtgcaacctctacgaagatcccagcaatagcatctacccctactattttacctacaaagcgatcacggcgtttctttagttctaacagtttttcaattggatctgtttctagtttctttttatttcctctaaattcataacggccatctttttccactactttatcgatgataagttctactacatcaccaatgacgatatcctccggacgaacgaatgaataagaccagtgtgagtaccttaccccaactgttacgccatgaatttcaactaagacagtttgtgcagatgggatatgacctgatacggttcctgtgtataccttatttccttcttgcgctgttacttcttcatataatcttttttgaagtgctaactcccctgccgtgatagatacaacggcaaagttcccttcttctgttttttggaagtgttcaataataacaggctttgttctacccactaaccattgagggtttttaggaacgtttatacctgcctctgtaattggacaatatgctgttgtatgagtaccaatctgcattgtaagcacttgtatacgctcagactttccgtttttagtcgggaatagtttttcagatacgactgtaattaaacctttccctacagtgcgttcacgtttcatgcgggccaattcttctaattcatgttcacgtactcgctcgaagtgattaaaatttgattctaacagtgtgtcaccgtgtggattctctgattcaaaaaccattccaagttcttctacagtttgagtgtttgttttgtcttctgccattacatttttcctcctagaacgtaaaaaaggacacacctgtaccgttgggatggtacgtaaggtgtgtccttcacgtaaaatatgatttatttatatagttgttaatataaatataatggtatttttactcaaatgcaagaataattttagattgattacaagtggattttggggattctaattatagcagtcatagcaaccccatccttaatgtgcattaattaaaaatgcgataattgtaattctcgatttacacgtgcgttttcactacgcattctaagatttttaactgcccattcatcaatgccaaaatatctacataatccattaataatacatttctctaaaatcaaagcacaaagttcagccaataatattacatctctcatttgaattttgaacttattttttattagatcataggaaatgcttatttttagttttctaccaagttgtaagatatctctatcatacttattatttctatgtacaatattatctcttaatctctgccaaaaagtaagtaactggtgattccttgttccgataatgaaatttttttctctattatctatatatttctcaaagaaattaaggtactcattcatgcaagaattagacaggtctaattctttggggagattagaatcaaacttagtgagtacatcaaacaaacttgctaaggtttcctctagtctgcttaataataatacaagtgttgaggcagcggatgtttctatttcgaattccttttcctttaccgcactaaaattggctggcccttgttctaattcttttgtaatacgctgctcatttttttgaaaaagctttacaatagatgaaaattcattactagaaacctccattatttcagttatttctaatgattgttcagtcgagaatttactcttttcatttcccactagtattaagcacattgctgatagatacatctgttctattgccatcacttttatatattcatttttcatcacttatgttcacccgattcaatttatttaaggaattataaaaaaatttatatgtagtgattttaaaatatataattagaattctcaataaaaaaacatagtctcatatttgaaactatgcctttttaaatttaaagtatgcagttatctcttataagaaaatctagaatagtttttctaaccgtattctgctactttttgtatatttaccaacctcaaatcaaaatctagaatgtagttccactagatttaatttgaggtttaaaaactattaatcaaagaaattattcaattctttactcattgcgtttgatgttttttgctttggtttctcaattttattaagcgttggctgcgtagtattatttttatttttttgctgggattttaagcgctcttggcgttctttgtaactcatacgcttatgttcaggttgcttttcatcatttctcgaatggtcttccttatttttttctaagttttcatgaactgtaatactaatagattcgtaaactcttgctacatcttcatcaagtttattttcttctgtataattaagcgtttcagtaattggaatcgtattgatttctacatgtgtttcgtctgactctgttgctgtagctgaaattgaagtagattctatatttgtttccgcagtctctataattggaacgggaagtccatcagatgggaattcttctagtagtggttcaagatcattgggaatcccggaatgaatgatggaatccttattccagtcttgctctagcatagtaatagataattctttgttcagttctgctacctccatatttatatcatggcaatcttccatatgaggtaattctatatctatactttcctcaataatttcttccgctactgcattttttatatcatgactcacacgttctattggcatttcttctactaccggtatttcgctatctcctggttgtttcacaaagtctgctccatcattacataaaatatctttaaatttgtttttcttcttttccgcagccacgctgtcttcgattggaatcgctaccccttgtgagatagtattctctgaatttttatctaatgaatgagtagcattaacagtgggaccttttgctaattcgggctgactattatgatttgaaattaaaactttacgaggaccatcgcctgtgtaagaacttacaactagattttgttctaacttctcaatatattgcatagccttcatatagccaatcctgaattttctttgcagatgagaaggtgagatttgttgtgattcaataataaattccttaatttcttcatacaacttattttcagccccatcatcaatatctatctggtggttcatagttgcaggatcattagatagaatttcatcttgggacttgtgttccttataatcatccaatgatacaatgtgttgttgttcttcgtttatttctatagagctattctgtttgatctcatcctcttgtataggcggcaaaggttgtaatttcttcatgttctctgcgtctacatgcttcataggatttgcttttgcaatagattcattaataagacgaagacgttcattttcccaatattggcctgttcgctcctctacctgtattagtgcatgcgcgaattcttctttaggtacaaagttactcgtaatttgttggacaggttgcacatgattatcttgtacaatacgagctgcacagatgaatgcaccttgtcccataatatctcctggtgacataacaacttcttttgctttctgataggttgatcctaatcgactaacaggattgtcttgcataggtgaaataccttgttcagattctgcctctttaaattcttctttttcaccaaacatatctgaaaagatttttgcatcatatggtgttacatctccaaatatcattttattacggaatgagcctagtaaggtaaacatgtattgctctgtgaagtcgagagctaattgagatagtgtttggctagcaattgttagaattactttatatttacgagattgagcagggaattctttaaacggccgaacaaatgtgtagcatcctagcccgagagggctggggtagctactaacccttacggtccttcttgtcgtacacaccatgatagggatattaacgcaagtatcaatctaaagaatgaagcgataaggcttctaaccgcaaggactgcggggttagcctaatcaattagagttcgatagaactctttacttaggaatccctcacttctaaacgaagtgaaagtgggggtagttcaatttaaggagtattttgtttgcttagcttgatagcaatgtggtgtcccacttatcattatgacatttgcactggctatggctaaaaatgaatataataagattttctataatttagatagatgagatgaataggtagtttaattagttgactatttgagctgcatattgttctaaatttgcgagtggctcccaaaaagaaggaatcgtggacgtaccacatgataaagtgagaagctttaaaatgtttaccttcgtctaaatacaagttatacacacatatattgatcttattaaggtatatattacacataatattatgctaaaggtggcgaattgtatcatgaaagattttgttctcgaaaaagaaaacattattcgtaaatatggtgaatggaccgcttatgatattaaattaacggatactctatatacaagagatattcgacaaccaaatcctgcattaaaaaaaattgtgacaatgattcaagatatcacacaatgtgattttaaaaatcttcgaatcttagatttagcttgtttagaggggcattacgctattgagtttgctatgcaaggagcaactgttgtagggatagaaggaagagaatcaaacatacaaaaagctatattcgctaaagatttattaaggttggaaaacttaactttttatcaagatgatgtaagaaatttaagtgctgaaaaatatggtcaatttgatattgttttatgctctggtattttatatcacttagactgcccagatgtattcccctttttagaaaaagtgtatgaagtatgcaaaaggtttgtaataattgatactcatatcacttgtactcctaatgtatcagtactttataaaaattatgaatataagggacacacaatgctagaacactctgctaactcatcaatagaagaacgtttaaaatcaaaatgggcgtcattagataacgttactagtttttggatgacaaaatcctctttatacaattttttaacgcgaacaggtttctcttctataaatgaatccagaagtttagttcaagaagataggattactgttgtagcttttaagaaataccctatagaaattaaaagctctcctgaaacagaaaaatacattgaacccgattatttagaatgctaaaaataacactatatgtcattcaagttaaaatcgtaaagtatccctaaacaaaattatcaattctccaaaacctaattatataaatgcaatccgttgtttacgttttgggatactatatagttgtagatagtgatggaataacaccgcattactatcaacttaaagaaatacttccgaaaacaaaaaatgaaaagaataataaaaaagcttatcatttcgtgttaaaagataagtttttttattttagggtaattacaagtattgaaattcttttaatactctcataataaacttaaagatgctcttttcgaccttttaaaattaacccttcactatttataagccgtgatataccaaatagcaacaacatttccatttttatcgagtactctgccttcaaccgctccttcttcatatgctgttactacaccagttttaggatttacataaattttgttttcactaaataagacatatttgtattgttttccgcttggcgtcattgaccaaggtttccccactttaatgtgcataaattcaccttgcacgtcagatacttgataaaccgatttttttgattcttgattgtttactgctgcgtgagttttagtagtagcaaaagttcctaaacctccaattccaatggtagctgctaacgcaattccaacaaattttttcatgtgataatgcctccttttttaattcatacccgtatattaaacggttagtctttcgtatcactttcatttaccttacaataaccttaaaatgatttttgaaaattccggctgatgagagggagagtatgaaaaaaaatatattaattgttgatgatgacaaagatattattgatcttttaaagctttttttagaaatggaaaatttttttgttgtagaggcttcaaatggtgaagttgccttaaagtgtctagaagaaaatcatattgatttagctattgttgatattatgatgcctaaaatggaagctttacagattacaaaataaaaaaggggctcatttcgatttcttgttttatcattttagtcaagatggttcctttaaaacctcgtataggtaatcagtacgattaaatgggagacattagtcattgcttatcgatggtaaagtagacgtatatcatttaataaagaacccatgtaacagtacaaataataatttgtatgtgaacgtaaaaaacaccaagatggccctagagaggagaggggcagtcttggtgttttttagttaagattacgattttttaagtgattttcatattctgttaaccacactaacatcaagtcctttaattcaatcgtttcaatttcgcaagtgtattcttcatcttccacatatcggtgggtaatctttgtataaactgatcttatctctaaatcagaattgttaccccatcaccatcaagttaaagttttttaaggtcccaaaaatgaaaaatatgctattccatttgtagaattataggaagggtggcgtatttttctttttgttttgctaacttgatgttaatgtggcgtaaccttaagtatttaaaaattaaaaaagtcccttagtcatgttaaaggtgaacttgctcacgcaaatgatctgtaaatcaattcatttttgatatacagatcatttgtatgataatttttataaataattgctaaatagtgaatttacataaatgcttttagaagttcttgaattaatgggattgctccacctataaattttaaaactgccattgcgatttccatattattctctcctcttttttcgtattaagatgtgataaatctttataatctcattatagtaagcgcttacaattataacaatacatttttgtatgcaatattgcatacttatacattagatctctattattcattttttaatggtactatagcggggggagagtctttaagggttctacttaataggaggaaatatggaaagagtgcaagcgatttacagaaatcaaaaatttaagagttgggttaagcaggtattagccgtaggaggagtaatagggtgctgctatttggtgttatatgttttctgtttcttagttatcatgtaaatattatacaactaaactagtagagtcttgcctagagatgtaaggctcttttattgtatgtagtacctggagatgagcaaactacatacaataactctcaggtttttcagatcactttgtatggttccttgtttagaacactaattcctagcattgaaaacagaattctattgataaaaaaatatgtttttactagatacatattaaaaagacaagcataaattatattagattttggcaaaatctttttgccttggaaaaggatttaaatcttactgatagatttgattccttttttatataccataatccttatattactacgtaaatataatacagtagtaatggtttaaaagcaagaatattagtagggggtacgttcacacatccatcaactgaagattgtaaagtagcccttgaacaaaaaaatctttttttattgattgatagtaaacaagaaaggttagcaaatcaacaactaagagatttcttcaggtaagctaataaggagttattacagaacattgcagtagattttgcattaacggctgaggatgcaaaaaaggcccttgaaagaaaaggggaatatatgaaagctctacagcttacaaggtgaaaaagaaactcattttaaaactgtttttaacattttattcttttaccggaaaaacatgggaggttaagggtggtagtttacatttaatgagggataagcaaaaataattgttaacaatattaagtgcagcatcttaattgtaaaatcttttatattcctgcaagtacaattcctgttaaataaaaaatttttaagttaatggatgtggagtctcgccacataataaaaaggtagaaatatatttaatatattcctacctttgattttattaagtttagcatctatgatctaaatatcacagaaggtagttttcttttatacttctatatctttcccttctgctaccactgtatctcgccacaacacaagtagttttctaaattcagaggtctcaattttacattggttatttggagcactcataaataagttaatagcactggtgtaattaggttcaatgtagactgctgctacgttcccttctatttcatattgcggaactttttggtctactacattatctaaaatttgtatatactcagctgcttcatcatctaaaatatcttccaagaaatgagaaattatagaaatttcttttggcaaacgtattcttaatccgccaagtccatcacgataaaattcgtatgtatatttcattttttacctcctagtataaacaggatatgctgttattatctcattattttgtataatcatttctactttaaatccgtgggatgtttgtcctacatatctaactgtatcgacttgaatcttattatcgtatgcttctttgatagactcaagtacctgtactctatcccaatccttagggaaaaatgaagaaagcgcattttttgtttcaccgtctacttttacttttgctctatatactcccgcagaatttggtgcatgggtaattctaactatttctcctccacccatcatactttcatggtgatatccaacagcttttagtccccatgaaaaaggtgctccataagtgatgaatcaaaactatacggaacattgccatcattagttctgctactattaattcttccactactagcaaattaataggtagagcatttttcttcagcttgtttaaagtttggtgtgtcaaatctagagcgcaaaccatctccaccagcaaaagcaaatcgatcttttaatggtaagtggcttgaaatataaggtgtatcacctgaaaatttcgttaactttacagagtctccaagggaagttacttttccaattttgcctgctcctttatctccaatccatcctaaaccaaactccataaaaatatttgttcctcattgcacccatacctgctagtggaataacttgctttgtaacttcagtatttgttctgattcggttaatctcttcaatttgttctaatagttctagttcaactacatctgttgaagcgatccttaattgaaattcggtaagaaaagcttcattcttatcattaagagctatcaattccttactagaaatatttgatacattgaaatattcttacatggtataattttcttgatgattttggaactagaaggggtttaaatgatgggaaactttcaaagtaattttcaaacagctacacaaattgctacacaaatgaaaaatgcatcggatacaattcaaggtgcgacaaatcgttctataacaaaggcgagccgtactacactatctgttaatgctcaggcgcaagaagtgaatcaataaatgctagatttaactagacaattttgtgaggcctttcaacaagcaattgataatattcatttagtagctaaggattttgaaagaatggataacgaactacaaaagacatttcgctaatgtggcaacctacggtaaagggagaagggtaggaagaataagatgagtcaagatgtggaaaagcaaataaatgaatttaatcatgaattacggatagtatttgaaaaacaggatcgaaatcaaacagagattcaaatccagagacaagcagaaatggactttcacgaattgagaaatcgaaataatcgtttatttaataggattttagaaacatggcatggtgataaagatgtttctcatttttttatgaataagcttcaagagtcgcaaaatattgagcggaaattaacattggaattggaaaatcaaaaagaaacattacttaaagaaagacgtaatcttattgatttagaaaccgaccttacctatcggcaacagcgattaaaaagggaggacaaagtatgagtttaaatatgtatttaggggaagtacaaaatcagacccaaagcatgaatgctgtatgtgtcgctactatccaagctatggagcaagcaatccaatcaattgatacctttgcaactgatacggttttgcaaggacaaacatatagtagtgcaaaaatattttttgtccaaacttttcgtcctttagcacaaggaattatttatttatgtgaggaattgattcatcaaaatgatgcgtttccaagcgattttcaatcacaagttgcttccacagatgtcatcgaacaagaaataagagagcaaattcaagaaattaatcgaatggtcgcaagtatagaagcgattagtattgctacagtattgcctggaatagatgccatggttattgttttagtcgagatgagaaaaaaactgcaagaaaaattagagcatctatatgaatttaactatacgtccagtaataactaccacacagctcttcaacttgtagctagccttactgccggccttgctgaagtccaaagtggaaaaggatttagtcctgtaagtggtacgtttagtacacaaggattaaatatggattggaccgtttcgatccaagaaattgctgatgaaagaaaacgtcaagttgataatcttttaaaggaaggatcaatggaagagggagcggtgtgcaagaaacctcctgaaaaatctacttctgaaaaaattatagatggtattttagaaggtacgggtcaagcagttgaagatacaatagatggtgttgtggcacttggtaaatgggaaacatgggagaacatggggtacgcttttacgcatttaaatgaaaccttacctgctatgtggaacacattatcagattcgtttattaatgatgtaataaatggagacgctgaaagtcgtgctaagtggggaagttatgcttttacacaaattggacttattggtgataaggggataagtaaagtcactacattagcaaaaggagcaaaattctctacaggaatgtcttctttcgtaaataaattgccactgacggatcggttggcatttgcaggtgcaagtggatttggaagcaatcaaataaaaacatttgaagttttacgcaaagctcgtgaaacatttatgttttccaaaactagtggaagaagtaaagttaaagatgttcaagaagtaattcaggaatatgcagataaggttcttgatagagtagaggtgaaaaacgaatatcctgattcttatacagcatctcaaaaattacgtgcagaacttaaagatgcaggagttgacacacctccatatcctaatgcggcacatcacatagtaccttggaatgatattagggctgtggaagctcaggaattattacaagagatagggataagttatgatgctgcggtcaatggggtgtttttaccatataaaataaatgattatgtaactactgaagttttacatataggtagccactcaaaagagtatataagagaagtaacagaaagattgaattctgttatagaaatgggtggtactcaagctgatatagctgaagtgttacatgggataagaagagatttattagagggtaatttgcgattaaatgaacccaagaaataactatataaatggcaataataaaggagaatatatatgaagatttggcaattaaaaagctcgactgatgattatgaaacctttcaattattgaactatgaagaggataaaaaatattttaaaactggttttaattctatggtaagtttgtcagattcgtggacgcctaagtttattgaggtaacagatgaagggaaatcaagcgattctcctattttttggggaaagtctggtgtacaaataattagtgaaaaagccaagaatgttttagaacctatagtaggagataatattgaatttttaccattaattcataaacaaacaaacaaaaaatactatgctatgcatgttttaagggtgttggaagcacttgatactaataaaacaatctttgataagttaagttcaggtttaataataggatgtaaaaaatttgtatttattccttatgttgtccagcacgaaccgatttttaaattgaatataaatgggaaggtacatcctaactatcttttagtatcagatcaattcaaaaatgcaattttagacagtgaattaaaaggttttcaatttactgaagtgtgggattcagaagagggtgcgtaaagaaatttaatctaatttaattagattagtaatgtgaatccatatctaatagagtaaaaaataagaagcttatgcacttgtataagctttttattatgaataagtatagaaagtgatggtaatttatattcaagatatattttagaatcacaaagtaaatagtagtaaacgattttttgttacgtaatattctattttactttagaagataaaagaatagttaaggggaataagcatgaaaatatgggtattaaagagtgtattagataactatgagtctttccagttattaaattttgaagaagatcacaaaaaatatattgatggaaaaataaattcagtaactcatttagcaaattcatggggaaatatatatatagagtgtattgaaggagatattcatagtgatttccctaaattttggggaggaactggtgctccaatgattagtgaaaaagccaagcaagtacttgaacctttaataggtgataatgttgaatttttaccactcttacgcaattcaactagtgaggtatattacttggtccacgtgttgaatgtactagatgcgattgatggtgataaagcaatctttaaaaaactgattacaggccttatagtaggctgtgaaaagttcgcatttgattttaatatagttcaaaatgaaatgatttttaaagtttacataaatggaaaaattcatccgacggttgtctttatttcagacgagttgaaggctcttattgaacaaagtgaattaaaaggttttgaatttattgaagtatgggattcggaagagggggactaaataatctaataagatgcccctatatctaatagagtaaaaaataattaaattcaagaaacttacactatcgaaaagaaatttaactattaaatctaccatatgcataagtcaattataagatcaggggaaattcgaaaatatgtaaatattatacatttttgcaaaagacattcattgacacttgtgtatataagtaactatactcgttacatcaaattgaatacattataatacgatttcattattatgacaaacatgtaaatataaaaatagaaaatctcaatttgataaatacaatggtagaggtgtttattttaatgaagcacaaattaattgcaacaggtatccttgcaggagctatattatcctattcttcaaatgttttagcagatactcataaattccctgacgttcctacatgggctgataagtccgttaactatttagttgataaacaggtattgaatggttatccagatggaacttttggttcgagtgactcattagacagagcttcggctacaaaaattatgacaaaagttttaggtatacaaattgatcctaatgcaaaaccatcttttacagattcacaaaatcactgggctactgcttatattgctgctgctgaaaaagctggtattgttaaaggggaaggtaacggaatctttaatccatccggaaaagtaactcgtgctgctatggctacgatgctagtaaatgcatataaactacaaagcacagcaaatcataacgagcaggttagatttgaagatttaaaaggtcattggggagaaaaatatgccaatattttaatagatttaaaaatttctaatggtaccgagaacggttggcaaccaaatagatttataacacgtgctgaaggaataacgttttttgacacttgggggtagtgcaaattcttaagttgatgggcatgtgtagcgtcccctaaattacttattaatcttcttaaaaaaattaatacgaaagataatggcaatactaccgctaatattaataaaatagcttccattaaataacccaagcgctcatccccctctttacctccttttcaatatatgaaaacagcgttgtcacatatgcatgcatttgcaaaaataatacacctatatttgacaactttataacaaaaacaaatcggaatgattattatttattgcaactttattaaagatgtattatactaagttcgcaaactaaaacgtaattattccgttttgtattaaaatgatatttttcttctataattggggaaaatatatccgtaaaaagaaaagaggagaacttcatgcctaaaagattgactatattttcattcttacttatttttaccttaattttcgctggctgctcaaataaaaaagaaagtaatgccaagaaagatggaaagctaacagtttatacaacgattttcccacttgctgatttcgcaaagaaaatcggtggcgactatgtaaatgttgaagcgatttacccacctggtgcagattcacatacatttgaaccaagtcaaaaacaaacagtacaagttgcaaaagccgatttatttgtttataacggcgctgaattagaaccatttgctgaaaaaatggaaaaaacattacaaaaagaaaatgttaaaattgtaaatgcatctaaaggtattgagcttcgtgcttctactgaagaagagcatcatgatcatggagatggccataaagaagatgaacatcatcacgataaagacccgcatgtttggttagatcctactctagcaatgaaacaggcagaaaaaattaaaaatgcacttgtagaattacaacctgaacataaacaagaattcgaaaaaaactttgcagcacttcaaactaaatttactgatttagacgatggatttaaggcagctgtagcgaacgcaaaaacgaaagaaattttagtttctcatgctgcctatggttactgggaacaacgatacggcctaaaacaaattcctatcgctggaatttcagcttctgatgaaccatctcaaaagcagcttgctgacattacaaaaacagtaaaagaacataatctaaaatatattttattcgaaacattctctactccaaaagtagcatccgtaattcaaaaagaaactggtacaaaagttttacgcttaaatcacttagctactatttctgaagatgatgcaaaaaataataaagattactttactttaatggaagaaaacgtaaacacattgaaagaagcaacaaactaatccattacactttctaggcagctgaatttgttattcagttgcctttttatgtatttatccttgacttgaccaaaataacaagtaaaattatccatattagctttaaagctatattaatttagaaggtgagttggaattatgaatcttcacatttgtgaagtaacagcaaaaaattggcgttcagtagttgctttagacgtcgcaaaagatcagcaacaatttattgaaagtaacgcgttttctttagcagaatcattatatgaaggaaacggaacgtcagtaggtttatatgatggagaaacacttgtaggatacgcaatgtatggatggtattcagtaaaacataaaagtgtatggctcgatcgctttatgattgaccaacaatatcaaggaaaaggatacgcaaaacgtttccttcgcttactcattcaattcttacaagaaaaatttgaatgcaaaataatttacttaagtttacatccagacaacaaacttgcaatgggactgtatgaatcatttggtttccgcttaaatggggatattgatgatgaaggtccagttgtaggtgttgtaatggagttactaatagacgaaaatataagcctgtgaaaacaggctttttattatacatttatcaatttttagtttctctcccttatttaattctgttttgcaatctaatagaatgctcataaaaaataagcctgcaatttacgcagacttatttcacacactcctcgaaatgttcttggaaccactctttattaatatctcttccgataaaaactacttcacttactcgctcttcgccctcttgccactctctatcgtacgaagcagcaaataacgtatgtacaccttggaaaacgatacgtttatctactccatctatcgataaaattcctttgtaacgatataaatattcccctagctcttgaacgacagctgacatccactcattaagcttttgtaaatccagcggacgttcttcacgtaatacaaatgatttcacaccttctaagtggttatgttctttatgagggtaaatttgcaacgtatctttcattttaaacgtttggatttgtaataaagatggtatatctacctcacagttagtcgcctcaattaactttgcagtcgggttaattccttgaatttcatgcaagagattttctttctcattctcttcaattaaatctaatttatttactaaaacgacatcagcaaacgcaatttgctcttttgcttctaatcctttttcaaaatgtttatgtatatgataactatctactaccgttacaacaccgttaatttggtaagcagattgaatgactggatctaaaaagaatgtttgaataatcgggcctggatttgcaaggccagtcgtttcaattactaaaccatcaaaatccattttcccttccgcttttacgtccagtaactgttttaaagcaacgagtaaatcttcacgtacagtacagcataaacagccatttgtcatttccataatttcttcttccacattcataatcaactgattatcaatgccaatttgccctatttcatttacaatcaccgctaatttcttaccgtgattttctgataaaatacgatttaataatgtcgttttcccagatccaagaaaaccagttaatattgttactggaatcatttcgtacatctccttatagctatatgtttctacattatagcatatgaacactcccccacttaacaaagcttgaagtgggggtttctaacgtttcgacctaacggacgattaacgtcaggggagttaacacattagcgagctgtttcacgcctaacccctctatcccatttgtccatgcatttgggattacttttcgtaaaatgttagccgcagcatttacatctgcattaattaaagttttatttgctgaacgatatataccgcgctttattcgttttcctgaaaaagttgtattttggtcattttctccatacgttggaatgaagtcgttatccagaaaacttgctttcgatgtatatgattcttcagttacaacaacttgaatgcctacagcatttgctttgtatgtaatcatttgaatcagtaaattatgcgggatatgacaaaacgattggttatttctttttcccatattcgtttcttgtttccaacttttgttttgaccaataacgattttacaaacttcttcttcttgagctagttttacgatgtggtgactaactttatggaagacgtcttttattttcaagtaacgtttttgatgaagtttttctatccttttagaagtaaaaggtccttcattcgtttgttttccatttctaagaatgcttgtaaaatgactcttcattttgttgtaatattgatttatgcttttgacatgtttgcccttaacaaggacaggtttcatacctgtgtttgttacgatggttgcaaggttatcaatccctaaatcaatactcatataacgagcattctcttcaatcatttgttgttcagaaggaacatcaattaccaattccactacatattcattgtattttggaatcacacgaacttgtttcagtttaccttcagtgaaacctagtttcccaatatttaattgcaatttcgtctttggaaactttaaaaatctaccgtttttaatgatgcaatcttggtttgtatacagaatctctttttcagaagaacgaatatactttggaatcctaggcattccatcatatttgtttggattctttttatagtcttttaaactagcaaaaaaagatttccaattttggaacaaacctttcatgatggactggctacattgcgtaggcaaagctcgataatcattttgaatcatagccttaaatagtgcatctagaaagttgtaatctacataaggtttttcaaaattaggttctgaaaacaaattacatgtaatctctttctgttcttctttaggctttactttctctttttccaatttcttccgatagacaagacgttgtgtgtcattcatcttcccaatatttttatgaatattatccagaacttctttttgcaaaggctgcaactctttttcttgtgttaatccagtgtacacctggcgtatataaaagtttgtggtgttgtacatattcttagcgttatgacaacattcttgaaaataagaatacatacgatgccctttttttatccagatttgaagagttttatagtttgatggattttcttttgccattttattcacctccttgttaaggatattatagcaaaaaagaacatacgtttccgtttttttctcaaaaataaaatattcctttcaattcacctcaccaccttcatttacgtttagagatgggagtcctctcgaaaggcatgatagaaaaaatcgtttttatagcaaaacatatttattgtctgtacacctaattaactatataataacatgtagtaagaaagccttttcaaaacattattattcatcaagggggtacttataatggatcgagttcaaatggctgaaacgctagaattttctcgtattattcaaggattttggcgtttagcagaatggaatatgacgaaacaagaattactttctttcattgaagattgtatggatatgggaatcactacttttgatcacgctgatatttacggcgcatatacgtgtgaagggttatttggcgaagctttacaattaaagccttccttacgagaaaacatgcaaattattacaaagtgtggaatcgctcccccatcaccgaaatttccagagcgatatgttgctcactacaatactagtgcagagcatattatgcaaagtgtagaagcatcacttaaaaatttacatacagattatattgacgtattacttattcatcgtcccgatccttttatggatccaaatgaagtggcaaaagcattttcacaattaaaacaagaagggaaagttcgtcacttcggtgtatctaacttcttaccttcacaatttaatatgttaagttcgtacttagatttcccgcttattacgaaccagattgaagtttctgcattgcagcttgagcattttgaaaaagggacaattgatttatgccaagaaaaacgaatcaatccaatgatttggtcacctcttgctggtggggagatctttactggtcaatcagaacgcgccgtacgtgtacgtgaaactgtgcaaaaagttgctactgagctaggtgtttctagtatagatacggttatgtatgcttggttacttgctcatccagctaatatgataccaatcgttggctctggtaaattagatcgcgtaaaaactgccgctcttgctacaaaagttaacttagaccgtcaacaatggtttacaattttcgaaagctctaatggacatcctgtaccataatgcataaaaagaagagctgttttcttacagctcttctttttcatatgtatttctagtcatggcaaatacacacatatctcttaatccgtttccatctaccgcaacactcgcactttctaacgtaccttctaacttaaaacctaatttctcaggtatcgctctactcttcttattgaaagaatcacaacgaatttctacacgatttgcttttaattcagaaaaagcgtaatccgttatacctttcgcagcctctaccatatagccttttccgctaaaccttgtatcaatccaatatccgatttcaaattgaggtatatcccaattaatacgatgtaatccggctgaagcaataaattcacctgtttctttcgaaaatactagtaatcttaaatcctcacgttgcaaaaattgaatatgtgattttctaatactttcttctacttcttgctctgtttgctctttttgtgcaaacaccatccaaggttttagttcttgtattgaagcctgaattgcatcatatacaactttaccatctcctggtttcggcattcgaataaaaagtctgtcagtataaaattcagaaggaaaatcgaataataacggattcactgtaaacactccctatatttcttttatatataataatatccatctgaagttatatagtaaagaattttctgaattgaaaaccttttactcattcacttccaccgctacacgaattccagattcaatcgcaccttgaatccatccgtgatatagcgttgtatgatctccagcgaagaatattctcccctctggtttgacaatcgctggttgcagctcagattcttgacctgcttgaaaaagtgcaaatcctccaagcgcatacggatccaatgtccagctttttgaaattccagatatgaactcatcatacacttgaccacctaatattgttgctaagttgtgtaatgcgtaataaatacgatccccttttgataaaccatcccataacaacgcgtcataagaccatgtatagctacctaacatcatagccggtcctttctccccaattccataatttggataataggcataacgaattggcaaatctgttataattctgccacctaattgtccttgttcttcccaaaatcggcttttaaattgaattcctattttcgtcgcaggcatataatgtaattcacgaattgctttccatttttcatgagatatagaatcaaacggatctacttctacaaaacgcattgtcgaaaacggaatggtaacaataactaaatctcctgtaatactactatattcaaaagtttcctcgttccgatagaaagctgtcacaccattatcgtgttgatgtaacttcattaatttttgattatatataatattctcttctaattgcggtaaaaatgactttggcaatctatcattcccgcccacaatttcacaaaatccgctctcctcttgcataatgtatagaaagcgtaaagtctctacaaacgaccgttccaaaaaaccttctaaatctaataaaacaccaatcatctcaattgttactggcgaaaagtaagtattatactgataaggatgatactttaaaaattgtccagtagagtatctcccaaaatcctttacaacaatatcccaatttttttctgggttcttttttataaaatttataatgggctgtaccgctaacaataataattcctctgacgtttttccaacttcattcatttccacaggatatcttagaatacttggatctttttcatattgttttaacgtcgttttccgtccatttacgtatataatatccgtctcattcctattaataaaaggactcacctgtagcccaaattttcttatatatgccatcgttaatgtatgcgaatacggaattctcattgctccaacatctaaatataatccggtatcttccattctcactgtttctatacggccacctacccggttatttgcttcaaaaattttcacatcatgtcctgcagcctttaataaagatgctgaaactaacccagccataccagctcccactacaataatctgttttgggcttatcgtcttcttcaatcctttatctataacttttaacgcttcatccatttcagtgttatacattatatctttctgcacaattccaccccttacttcatcaaatggacgttagtggtttagtgcattttattcataaatccccataaacataacaccattgcaatttgaatattcactaaaagtacataagagacagatctcacttttctttatacttcgtataatatagcaactacaaagaaggagtggttaaaaatgaaacatacttatgactacgatgctacaaaaaaacatttagaattaaagaaacaaaacttatgtaaaaaacttagcaatatgacactatctgaaaaagaacgtgaacaactaaagcatgaaattgacaactatgaatatattttaaatctagtcgaaatgaatcattatgaacgcggattttctcgttaaaagcggaaataagattatccgcttttcattttgagcatttcactacgcatttttcataagtaaatatataataggatgtacattaagattgagaggtatattctatgatcaagttaagtgtattagaccaatcacctatttcagatggtagcacagcagcccaagctttttcacatacagttacgcttgcacaagaagttgaaaaactcggattcacacatttttgggtatccgaacatcataattccgtaagcttagctggttcaagtccagaaattcttatttctcatattgccgcaaaaacggaccgtattagagtcggttcaggtggtgttatgttaccgcattatagcccatataaagttgctgagaatttccgtgttctagaagcattgtatccgaaccgcatcgatctcggtgttggtagagcacctggtggtatgccaatagcaactcgcgcacttcaagaagggaaaatggtctcacttgatcaatatccagaacaaattgcagacgttgcaatgtacttacatgatcaagtaccagaaaaccatcactatgcaaacttaaaagccactccagttatcccaacgtctcctgaaatgtggatgctcggttctagcggagagagcgctaaaattgctgcaaacaacggagcttctttcgcatttgcacaatttattaacggcttcggaggccctgaagttatgagggcttaccaagaacaatatgagccttcatttttaggagataagcctaattcaatcgttgccatctttgttatatgcggagaaacaaatgaagaagcggaaaaaattgcttctagtttagatctatcaatcttattattagagcaaggaaaacgaactactggtacaccttctattgaaactgctcaaaattattcatacagcgcttatgatttattccgtataaaagaaaatcgtcaacgtatgattgttggtgatccgtcttctgtaaaagaaaaaataataaacttaagcaaagcatacaatactgacgaatttatgattgtcacgattactcatcaatttgaacataaattaaattcttatcgcttactagcaaatgcttttaatttataattctaaaaagagatgcatcacgtttaaaatgtaccctatagaatagacacttgaaaaaagtctattctatagggtatttgtccggttggtcctgttgctcctgttattcccgttactccgatcggtagagctgtgacgtactgtaaagctacatcgtctataagtactctggaactcccggcttgtccttctttataaataagtaaaatagctttatttgctaaaggtggagactgaggagtaattagatatatctctaaccaattactttgattgccattcggaagatgatttaatggaatacttataattaagccttgttccaaaaaaatagaattataataataagcaagcttaatagaaagcggaggacttggagcacccccaattttagcaagtgaaataagaaattcaaaactttcatttggaggtatagggattgcttgtatgagctgagcattagcttctcccccaattaagcttgcactatagatgcccgaatgactatttgtattaacaacttgcacgtttgttgtaatgaatggggcaagagtgccactttcaaagcctccattcattatcaagttagtaatcaaaaaatcacctctttaaaaaaataatttacaaataaaatcaacttctttatgaatttatatataaattaaaacttttataactaaaaatacatcattcttaaattttcctaacaaactattttgtagtttttatacaatcaatcacctcatttccctgatgtattaagagacaatattaaggaataatacatctgtatttattgtaatattatcttctatggttcaataagtaagagtgacaaaaagaagaagctaagaaatatttcttaacctcttctttttgtagattactttggtttatagtctgctttaaaaattacctaaagtaatctcatatcaaaatgttttgaatgtatacttacatttccgattttaaggatgttaggagaattggaatggagttactattttcgttattgtgaaagtaaactaatatttttaaatttacattagtgaacaaaaaagtacgaagtcaactaaaagacttcgtaccaacaacagactaaagtacagttcataggaaactgaaagggtatttcatctatttattataactcgcccattcatatttctaggaattaattattaaatatgcatagttccatatttaattgtctttataagtaaaaaaccaattcttctgtaataggattggtttttttgtatgtaatttagttattacagcaaccggaactcgtatttttaaatgtagtcttatcaatcttattataaaataataagtaaacataaaaagactccttatatataaggagtcttttaaaaggatacaatccctttaggtagatagtgatgggtatctattataacatatttttttataaaagatgagtaatacaaaattgtaattaaaattagttggttatggtacagcagttatattagcatgtatcattgttctttacatattaatatgtaagttaaattaataaattatataaattatataatttattaattttcatcattgatggaaataataaacctagttcattgaaaaacaacaatattacttttatacctaaataaataacgctagcatattataatccattttctctaattcatttggtatatattacaaattaaagtgcagcctaaaaaataaaaatgtagcatatagaagggtgatcgtgtgaattttatttggcaatctttaattttaattcttgctggaattcttttattaagaattgctggaagaaaatctatatctcaaatgactttagcacaaactgttgtcatgatttccattggtacgattattgtgcaacccatcgtagaaaaaagtactataaaggctgttactagtgcttttatatttgtagttacagttatacttttagagtattttcaattaaagtctaataccttcgaaaaatttattactggtaaatctaaagtggtcattgaagatggtagacttaatattgaaaatttaactaaattacgtttgacagttgatcagttagaaatgcgtttacgtaatcaagggatttctaaaattgcagatgtaaaaacagcgacacttgagcctaatggtcaattaggttatgaattaaaggatgaggcaaaacctttaacggtaagagattttcacaaaataatgcaatcatataatcagtctctagacgatgtacataatgaacagagagaaagtaataatatatttcaagaagtaaaaaacacaagcaaaaataaaaataaccatagtcataaagaacttaaataaaaatggttctaacataccttacttaaaggatgaaaaatacaatcttaatggggtattcctagcttgatggtgatggggtagcgtcaggaaaatgcggatttacaatgttaaggaaattcccatattaaaaagccaaatttctcaatatttatattgaaaaatttggcttttttcattactttgtaaaagctccctttaattgaataactaaacaaatttaaacgcacctatttgtataagtaaaattattcgcaaactcttcgttgttttttggttcgctatttatctataacaatcgataatttatagtttgcatattcgtttaattctttcagaaattgattcattaattctatggatggaaatttacattcgagaaggtaacaaccatctccactgattttataattatttattaaatatttgtcttgcgtttttatgaatgacaaataaggttgatgaaaaatgctttctgtaatgattgtaataaaagcatgtatataacagcctaatttgactcgattaactttaattgtataaccctcaataactccttgatcttctaatttcgccactctagctgaaacagctggtccagtcaaatggactttctcacctaattctttcatcgtgaaccgactgttcttggatagttcatctaagatacgtttgtccgtattatctaacatttatataactcctttcattaataaagtaaaacgaccaaaagactttatttaatctgtgtatccattattgggaataatataaactatacattgttcaaagaaaatctcaaaaaaaaggagttaataaatatgaatatacatcaaattcgtaatgcaacaatcgttgtagaatatgcagggaaaaggtttttaatagatccaatgttagcagagaaaggaacttacccacctttcccaaattcaccaagacaagatcaaaataatcctttagttagcttaccagtacccgttgaaaatattattaataatatagatgcagtcatcgtaactcacttacatttagaccactttgacgaggcggctcaaagaatattgccaaaagacattaaactatttgtccaaaatgaagaagatgcgacagaagtaagaaacgccggtttcaaaaatgtagaggttttacaggaagatacagtctttgaagggatccaactacttaagacaaaaggcgaacacggtagaggtgaaatactaaaacttgctggtttagtatgcggtatagtcttcaaacatcaaagcgaaaaaatgttatatgtagccggagatacggtatggtatgacgaggttcaaaaaattctcgatacacataaaccagaaatcattgtcgtaaatggtggagataatcaattctttgaaggcggttctcttatcatggataaagaagatatctacgaggtgtacaaagctgcacctaattcccaaatcattgtagtccatatggaagcagtgaaccattggaacttatcaagagaagaattaaaaagctttattagcgaaaaaggaatcacttcgaccgtttcagtaccagatgatggccaatcatacacgttttaaatccaattttcgttttgaggaacagccaatttcttaagttgatgggcatggggtatcgccaatcgaataacataaaacctaagctaaataaaaaacaatttcctagtaacaggaaattgttttttatttagcttttaaatcgtagttggtaatattttattatataattagtaaaaaataagatgaaatagctaaaataactgcaataactaagagtgataaccatacaattaatgtggtatgtgctcggaatgttttgacgtttaattagatattgtaaggttgcaataataatacttattccagcaataacggatccaattcctattccaatagcaatcttattatttaatgaggaaagctcttttcgaacagctaaatgaaaattagctacaagaaatcccaaaccagcaatagcaattgcagtacgtaaccaagctagataggttctttcattagctaaatgctgctgaatatattttgaatctactgtttcaagggcttttgacttcactttgtgttgctccattacatcgactcactccattaatcagcagtatagtgtagatgtgcatatccttttttacgtctataccacacaataagaatactacaaagtacgcacccaattgagactaattgagctattcttatatgggatgttaacatgagactatccgtacgtaagctttctacaaaaaatcttcctacagaataccataataaataagtgaggaaaatttctcctcgtttcaaatcaacttttcttaatacgagtaatactatcacacctgtaatattccagacagactcgtataaaaaagttggatgataatatgtaccatttatattcatttgattgataataaaatctggtaaatgtaacgactctaaaaagcttttagatacaattcctccatgagcttcttgattcataaagtttccccaacgcccaattgcttgcccaaaaagtaagcttggagctaaaatatcagcgattttccaaaaagaaaggtttcgttttcttgtaaaccatatagttgttagtacagctcctataataccgccatgaattgcaattccaccatgccaaattgcaaaaatttcaactggattttccttataataattccattcaaagattacataatatattcgtgctgaaataattgagataggtaaagctaaaaagattaagtcgtaaaatacatctgaagatattctgcgttttttcccttcacgagtagctaagataaaccctaatatagctcctataccaataataactccataccaatgtacagcaatgggccctaggtgaattgcaataggatctaagggtttaatttgttctatcattgaaaaatgccccccttttatttaaaatgtttaacaatatatacattttagattatttttattataacattgaaccttatcaacatataaaccaccttttctattatccgtattaaattacaaatgatattatgagagcattaattatcgttacatcgtaacaaaaacgaccatttttgttacggttattattaataaacttttagtctaatgaacttgcatactgagtgtaacaaaaatatgtaacaatattatttgtaacaatatctccatttaatcgtttttggtacaatagtcggtgaaggggatgataaatatgaagtttggttatatgcgtgtttctacattagatcaaaatttagatcgtcaaaagaaacagcttgaagaatttgaatgcgaccgtattttcttcgaaaaagtaaccggtacaaaacgaaaccggccggaattaaatagtatgctggaatttcttcgtccagaagatacagtcgttgtaaccgatttaactcgattatcacgttctacaaaagatctcattgaaattacggaacgaatttctcaaaaaggagcacacttgaaaagtctaaaggaatcatggctcgatacaacaacagcacatgggaaaatgttgtttactattttcgctggtattgctcaatttgaacgagatttaacttctgaacggacaaaagaagggattgaggctgcaaggaaacgagggaaacatcctggaagaccaaaaaccgatgaggaaaaggtagattacgctttatatcttattaatcaaggtatgagccgtacagatgccgccgagaaagctggtatctcgagaatgactttgtaccgtaagatgcaacagtaaaatacatatagttttgattttagtatagtaggaggaattacattgacctcaattgaacgtacagcctatccaaggtttaaacgaaacttaactcgaaaagagctgaaagagatttataccgtcacatatgaggagaaccaatttgcccatagagtagcacgtggaactattccggtctttagccttttagttatgctaaagtctttccaacgactaggttattttccacgtccaaaagatattccatctgtgataattcatcatatccgttcgagtttgcgtatatcaaatgaaaccgaaccaaacttccgaacaaagtccatatatcgacaccagaaagcaattcgtgagcatttgcaagtattgccctttgggaaggatgctttacatattgctactaatgccatatataaagcatctcaagtgatggataaccccgctgaccttattaatgtttctattgaagaattaattaaggaacgttatgaattaccagcattcagtacactagatcggcttgcacgtcgagtgagaacgctggttaataatcgtctttgtaatacaattctcgcccgtttgtctaatatagaaaaagataaactcgatcaattacttcatacgtcaaaagaaactcaacattctggttataattattttaaagaagttcccaaaagcccttctattactcatatgaaagatttacaaaacagactttcatttattacgtctttccttccaaacattcatgatttattagaaggcattccaatttctaaattgaagcactttgctgctgaagcgaattctttagatgcttcagaaataaaggacttcgctcctcacaaaagatatatgctgttgttatcaactatttatcggtcacaaattacaactagggataaccttgtagaaatgtttctaaaaaggatgggaatcattcataaaaaaggaaaagaagaacttgctcttttgagggagcaacatcgttccataagtgaaaatcttatttctgtactgagtgaagttttagaaacaacagctatgcatgatgataatacacaaattggcagcaaaattactgagctatttgaagctaaaggtggtatagaatttttaaaacaggactgtacagcaatatcctcatacaacggaaataattatctaccacttttagaaaaattctataagaatcatagaaaaacattatttcggctcatcacattattagaaattgactcaacaactcaagacgattccctcataaatgccctggaatttttattagagaacgaaaaccgtaaggttgaacatctacctagtgatattgatttatcattcgccagtgaacagtggaaacatacaattcgcgttgaaaaaagcacaaatttactttaccgtaaacgtcttgaaatctgtatattttcttatttagcctctgaattaaagacgggagaccttagtgtaaaaggttctgagaaatatgctgattatagacaacaattacttccatgggaagaatgccaaccgatggttgaagattattgtaatgaactagaattaccttcctcacctactgattttgttaatcggttaaaaatttggctaacatccgctgcaaaaactgttgacctaaactatcctaataatggacaagttatcataactgaagatggagaaccaatcctgaaacgtttggtacgaaaagagtcttccaagagtagtaaaatgttagaaaaagaaattatacaacgactaccggaacgaacgattcttgatatactttgtaacgttgaacactggactcattgtacaagacatttcggcccattttcaggatctgaacctaaattagagcatccaattgaacgttatattattacttcatttggatatggctgtaatttagggccagcccaaaccgctaaacatatgcgaaatatagtaacacctcatatgatttcttttgtgaatcgtagacatatcagtgtccaaaaattagatgcctcaattcaagacattttaaatcaatacaacctctttagccttccaaaactatgggggagtggaaaaacagccgccgctgatggaacaaaatacgatttatatgaagaaaacttactgtcagaataccacatcagatatgggggctatggaggaatagcttatcatcatgtttcggataattatattgctttatttagccattttatcccctgtggggtttgggaagctgtttatattattgatggattgctaaaaaataagtcagatatccaacctgatacgattcatgctgatacacaaggccagtctactcctgtctttgcactttcttatctattaggaatcaatttaatgcctagaattaggaattggaaagacttaaaattctttagaccaagcaaacatattcaatataaacatatagatcctttatttagtgatgtaatcgattggaagttaattgagactcattggcaagatttatttcaagttgttttgtctataaaagctggaaagatactaccctcaacacttctcagaaaactgagaagtgatagtaaaaagaatcgactgtaccaagcatttcgagagctaggcagagtcattcgaacgatatttcttcttaaatatatctcagatatgaaattgagagagcaaattacagctagtacaaataaagtggaagcatataatggtttttcaaagtggttattctttggtggggatgggattattactgaaaatgatccagtagaacaagaaaaacgtattaaatataatgatctcgttgccaatgcagtcatttttcaaaatgtcgttgatattaccatgattttatggcaactcaaaagagaaggttatcgattctcacgagaagatctggtgatgttaagtccatatatgacgaaacatataaaacgatttggcgattatgtgattgatttacaaaacattccacaaccaatagaagagaatatacctgtataaaagataatagggtcataacatggaaataaaaaccagtctatgacccatttttacacgtatctcggctgaacccctaattgtgccgctgttaaacgatgaaaaacaagacgtgaaaataactgctgtttatctccaatataagcttgctgatattctatcgtttctcctggttggagttgattcaaaatctgtatgacgttgatttttatgtattctgattgttttttaatggaaccatttttaaaatattccggatctggattttttacatatacatttgtatttaactttaaccgcgaaatataatacgtaccccgttgatccatttgatctaaatcctctaatgggtgtttttgcccatcccctcgaaaagggggaataagaaaaaataggatgtttttaaaaaatgcacctccaattgttagttatgtgtctaacaattggggtgcacttcaaaattgatagtctttagtcgtcgctacgctgcataccagtatacattaatacgagacgtaataattcaaataccgctacagctgcagctgctacatatgttaatgctgccgcatttaatactttacgagcttgcccatattcatctgttgatacaatacctaacgcttcaatttgttgcattgcgcgctttgacgcatcaaactcaactggcaatgtaacgagctggaacacaacacctgctgccattaaaatgatacctaataacaacaaaccagacatttgtgcaaatataccgattaggacgaaaatccaagacatattcgaaccaaagtttgcaactggcactaacgaatgacgaacgcgcataaatttataatcttttgcatcttgaattgcgtgtcctacttcgtgtgctgcaactgctgtaccagcaactgaatgtccataatagttatctgttgataatcgaaccgtcttagcggttggatcataatggtctgataaatgacctggtgtttcttctacagctacgttgtataatccattttcatctaaaatttttcgagccacttccgctcctgtcatacctgatgttgaataaacttgtgaatacttgctataggcactacgtactcttgactgtgcatacaacggtatgatcattatgatcgcgaagtaaattaaataaaacatcatgaacctccattgaagttttaattatagtacttctcattctattttcttctgccactattgtcaatgaataaaccttacaatccatatctttatttattgcattatctatttttagaatgtacattactttttcttttttctctttctcctttatactttctccatccaacataagttaatgtgaagaaaataagtcccccagtaattgtcataaaccaaatgagagagggtgcaatttcatctttttttactgtgtgaaatatcttttgcaaatcccctttaataatccctaattgcatttggccgcctttcgtttttaacataacgttacgaaattcatctaaataagataaatgaacatttacacgctgaacctcgttttctggcaaagcaatcattaagcttggataaataatattgaattcatttaaaaacgtatttaacgtttgttgaaactgcccagcatcttctttttccatcgctttttccatttgagaaaaggcatccattactttcctttctctttccatccaaagtggttgatatttcgatacttgtgcatcaacagcaagttgtaatgccagcacattatcaattttagcttgcttacctaaaccttcttcagagagcgattgttgcgccttatcgtaagctaaagaaataactctaacttgatctggtgttacttcctgcttcttttcattcccctttattaaaaattgctccgagaaatgttgtaatacttgtaccgctttttcatcttcattacgcttcactaactgtaacgagtcgtctaacaaccctgttagctcattccactcttcagcatatatacgtaacggaaacattataattagaaatgctatcaatccaattaatgttctcttcatcccggtcccccctataactactagtacaaaatatgttaatttggacaagaatagaacagaactagaccgaaaaatatattatcattttacaaagaaaaaaattctctttaagcagagaattttttctgtgacatccttttcttttttacgaaatatcgatataaactgtaacaaagtatactaccacctaaaatgaataataaaatagcacacgcagcatgcataaagaactcttctggtaacattaatataattggatctttttcaggatcaaaaacccaataatcattactaaataaaagtttatggaataatacaaaactcttttcaaaattaatagcaatcggtaacataagcgctatcggaaaaatgattgttaaaatcgatccgtgcagtaaaaacttttcatttttcttttttaataaataaattccgcctatcactgcaatcataattgtcgcatacatcacatattgaatctttactaaaatatttttaacatctacaaaatgaatacggccatttgtggacatatctaatgttggcaaatgtaatgctccgtcataaaacggggataaatatgtaataagcacatcgtaatttcttttaatttcatccttcgtcatatccgctaaatcaggaatatttaaaaaatcaatttcaaaataatacagccattttccatagacaactgccgttgttgcgagtgcaaaaatagaaaatgctatgctatatgaaacaactaaagtaatcaatcgatccaatatttttgtaccactcttatttttctccatgttctccccctaaatgttctaaccatcataaagaaaattgtttcctttgctcacgtaagcaacaataatatgtaatacatagtacagcaatacttaaccaaaacgtaaaataaccaatttcctctacaaacaaatgcataattccatatcgcggcatttgccaaaataaataatcaattgcatcgttatgcaacgtccacacagctgctactataaaatgccatttttttatacgatagaatggagcatataaaaatccttgtactgccatcgcaaagtgcgaaagcattaacatgtagcccataaggccaataggcccttttacgtaaatcataatcccgtttacaacaacagcccaaataccatattttattaaagttacaatcgctaacgcttctattaatccccagtttctctttgccaaaaaagcaattaaaacaaagacaaaaaagagactcgccataggactatctggtacaaacggccaaaatataggtgacgtttctttcaattgatttccgtaccatataaatccgtaaattgtacctaatatgttaacaattaataaaaataataataccgagcgttgtcttaacattgcatacaagtacaccaatccgtatgtccaacacctttcaagcaaagtaattcattcattaaatcctactctattataacaaacttcatccaactaaatagaaaagctgactacaaattttgtagtcagctttttattattttttattatactttgcaacgaattccgaaagcttcttcagttcctcatccgtacctttaaatacacctttaggcattgaaccttttccctctttcgcaattttagcaatttcttctggctttaaagttaagttttgcagtgccggtgctgctgccccgccttgtaaattgtcaccatgacatgttaaacaagtatttttttgcattaatttatagccatcatcatttttatcaactggcgctgtttttacaattgctccttgtttttttgcagcttcccagtcgtggtgtgctacagattcccaagttaaaaagataatcgatgcaattgctaaaagcataaatccagttgccacaggacgcttcaatggacgtctttctggacctcgatcaagaaatggagctaacagtaatgctccaaacgcaatccctggcataataaatgctccaattacagtaaatgaaccggaagcatacgaatactttaataactgatacaagaataagaaataccaatctggaagtggtatatatccagcatctgttgggtccgccattctctcaagcggcgacggatgcgccactgttaaacataaataaccgattaaaaaaactgcaccaaccatccattcttttaacaagaagttcggccaaaatgcttctgttttccctgggtattcagaatagtcttttggaatatttggtttccgagctactggtacccgagaatctcctacaaacttcatccctttgccgcgatgcataatctccctcctttagttctttcccctttaatttagcaatctcttatagtggaccggaaataccttgtttgcgaatcatgatgaagtggaaggccattaaacctagaagtgctgctggtaagaagaagacgtgaatagcaaagaagcgagttaatgtttgagcgccaacaatttcggaatgaccagcgagtaatgttttaatataaggaccaatgagcggtgtttgctctgcaatttgaatccctacttttgtagcaaataaagctttcatatcccacggcaataaatatccggtaaaaccaagacctaacataacaaagaaaataagaacaccaacaatccagtttaactcacggggctttttatacgcaccttggaagaaaactctgagtgtatgtaaaaacatcattacaattacgagactagcaccccagtggtgcataccacgaacaatttgcccataagcaacttcattttgtaaatagtaaactgattcccaagcatttttaatatcaggcacataatacatcgtcaaaaacattccagataaaatttgaattacagtaacgaaaaaggtaagtcctccaaagcaatagacgaatgcagaaaagtgatgtgccgggtttacatgttcaggtacttcatgatcagcgatatcacgccatattggtgtaatatccaatctttcatccacccaatcataaattttatttaacatctactttgcaccccctcttggcttcgcttttcctagatacagcgttccatctttcactttagactcgtacacatcaagcggagcaaggggtggcgtacctttaatgttaatcccatcttttgtataacgccccccgtgacatgggcaaaagaattgattcggatgtgctttgtccgaattccagttaactgtacatcctaaatgtttacatactggagagaacgcaacaatgtctccgctttcatctttatgaacccaagccgattttggttcttcagacttgtaccaaccatcaacctgcttcactttaaaatcgaaacgcttcggctctgttgtaatatcctttacttgcgcaacagcaaccatatctgttcccgcttcttttcttaacaccggatcaagcgcaaatcgcgtcatcggcattaaaataccggcagccataaagcctcctacccctgtgagtgtgtaatttaaaaattgtcttcttgacacgcgatgttctttgtcgctcacgaaaatttcccccctctatcagaaattgtcccctcgtgataaattatataaaaaataaaaactaggacactatcatgatataatacgctcatgcacaggtcaatatcatactactcataataataagaactttctgtttattgcgagtttccccatttctcttccaacatcaccattatattttttatatgcgcatgaataacttctctttttgcttgatcactaaattgttctaacgctaatgaaggaaaccaaaataaatctccctgtaactcttgcatatcctctttccatgaaaaatcacttgtaacataagcaatatgcttaaaaccttcacttcgtaaatgatttgtccattcttgcaaacgacctttttcattcttttgactttctaccaaatacgtaaacgcaggcagtaaaagcactcttcctttatactctctttccaattccgtgctcaacaattcgataaattcaccttgttctacaaccattttcatttcttttgctgccgaaattgataacagcggtattactcctgtatcaacatactctcttgcttgctcaaactgttctacatcttttacaatccacttcaaatcccttccctccttcacttgcaaatgacagaactttcactttatatatattaaaccacactaaaagaggtaaaaaaagaaaaactacccaatataggtagtttttctttataaaagtctgaaatttgtaaaaattaattaatccaaataaattctataaagtctttaactctgccgttaatctatgaaacgcttccttatcttgcttatctaacgcttcatcaatttgtttcaaaaggcgttctctcctaaacgaaaatacactttcttccaaaaacctttctgcaagtaaacgatctttttcatttacttcaatatgctttggtagatatgggttttcttctaatacagctacataattcgcattttgaaacgatgatttaaagttgagttgaatataaatatcctcatctcgatttaaacgaatatcatgaaacgatttttcagcatctgttgtcataacattttgtttaaaaaagtgaaacggtgtgtctttcacacaattcgctgacatcactaagccacgcggacaatattttgcatgctctacgaagtggactttatgcatcaattggtcgtgactcattaaataattcagaatccatacacattcacgctgtttcagttggtaattattcaaaaaccattttacaaaatccttcttctcgtttacagaaacaggggtattcatagcaattaagtccctcctctgtctttctcttttctttttagattcaagaagcggcattcagtttccttccaacttatgaaaaatcctctaaattatataacaattcttcaatatgaatttgtgtcgggtctagttgtaataactgggtaaatacttctttcgcctcttttcgttttccttcttccaataagaaataaccgtactcttctaagaagtctggatgattcttaaaagaagtatatgcactttcatagtgttttaatgcatccgaatacatttctaattgtttttttgcatacgcaagatcccaaagtagttgtgtatctggttctccactatcaatagcacgctctacaattgcaattaactcttcgtacttttcttgtccttttaagatatatgcatattttaatgttgcacctaaatgccctggatctaactcaagcgctttttgaagaacttcctctgcttctactattttccctaatttcgccgcaatgttcgctaactctacataaaatggaactgaaagctcatctactttaattccttcatgaagcgtttcatagctttcttgaagcattccttctttttcatagcttttcgctaaatacatgtacagtgatgcgtactcagggtctaattcttttagttcttgccaagcaccaattgctctctgatattcttcaccttggtataatgtaaaggcatatccaaataatgagtgaatatctttttgttcctctaggcctgcttcataataagaaatcgcttcttcccagtttccgatcgcgcttaacgtttctgcgaggcgaagtgcgatcacaacaccacccattactttatgttccgctaatagcgattcataataagtaattgccttttgttcttcacctttactactatataattctgctaacccaaacgtaataacaggttcatcaggcatcatttctttcgcctttaatagtttttgctctgctacatcatcaaaaccttgcatttggaataaatctgcaacaagtaataacgattgaacatataaatcgtcattttctggaatatcatgaagcacttcaatcgcttcatcttctttatctagatcaatatataattctgctaaaaatacagtgaattcactttcttctggatacagtaaacgtaagtcttcagtaattgctaatgcctcatctgtaaatccaagcgtatgatagtaacgagcgatatcatacttctcttcatcattcgcaatttttaattgttcttttaataattgtaatcctttttccgcttcaccattttcaatatatgaaacagcttgttcaaacttttgcataaacgtctcctttaattctaaaaaatattctcttctgttcatttatcataagcaactcactgttagaacgcaacctttagaatgagcatacttcttcttatacttcttcttacagagtagttaattgttcaaaaggttcggatatgacaccgataccttaccatcatcttctattgtaccgctttcttttatgaccgtgcaaataacttctctcactaattatcgagccatacaaaccgtggtttacagaataacttaattagcagtcttcaacctttattttgaatgcgataaaaaaggctcctatactaggagccttcacaatctcttaagaatatgtttcttctttctgtacttgctcatttacaagctctttcagcaactctataatttcatcattttcttccttcaaaccgacagtaatacgaataccatcatcgataccaaatgcagcaccagaacgaacgatatatccttttttcattaatcgttcgaaagcttcattacccggtataccaagttttaagaaaatgaaatttgtttgggatggataatagaatacgttatattctttacaaaatgcataatactgatttaaaccttcagcattcttttgcacacaatcttgtaaaaaggcttgatcttctaatgcagcgagtgctacagattgggctacagttgatgtattgaatggtaacctagctacttctagctgtccgtttaacttcgcatccccaatcgcatatccgatacgaaaagcagctaaaccatatgcttttgaaaacgtgcgtaaaaccataagattttcatacttttcaagaagtggtaatgtttgcggatagtcttctgcttccgcgtattcataatatgcttcgtccataataacgagagccgacttaggaactgattctaaaaatgaaagtaatttttgtttctcaacatatgtacctgttggattattcggattacaaatccagacaattttcgttttctcatctacttgctctagcattgcatctaaatcgtgaataccatctttaagtgatacttcacgaacttctgctccttcaataacagcatggtgatgatattgtgaaaacgtaggattcgccattacaacgtttgttccttcatgtagtaacgctcggctaatcatttgaatgacttcatctaatccactaccaaatagtagttgttctgcttttacacctaaatgttccgctacttttgtccgaagttcaaaggcatatccatctggataaagggcatattggctcgctaaagaagttaatgcttctgtcacacgtgctgaacaaccgaatggattttcgttggatgctaatttcacaatttttgataaaccatattctctttttacttcttcaatgtttttcccaggcacatacgctctcaaagttaacaattgctctttcactctcatttttcttcccccagtcatttcattcaatttgattacaatacggttatagccccatgcccatcaacttaagaatttgcactacccccaagtgtcaaaaaacgttattcgaataacgttttttgacacttgggggtagtgcaaattcttaagttgatgggcatgtgaggaaggggtcttcttggctaaaatgataaaaaaagacaaactctccaatgtgaggagtttgtccaaaaccatgatttctttagtttaacaatatagaattcagttccgataagaatctttcttttttccatatcccacggtttttgcatcgatactaacaatagtggattagaataatgacttaatacttgctaggacagtaagaatacctataataatgacaaatacattgctagatttccctttgtatttagcaagtactgatactttatggattgcatacattggtagtatacataagatagcagcaactagcggaccgctaagggcatcaatgattccaagaatacttggatttgtataagcaacataccagcatgttaatacgacaaaagtaagaatcattgtcttaactgttttttctcctatatctttcccacgttttttactggacttgataatcatgtcacgcattacctcatacgctcctatataatgaccaaggaaagactttgtaatagccacaaatgcaatgataggagctgcaatagtgattactggcgaattaagctcattagcaagatatgataggattgacaagttctgttcttttgccaccttaagatcatttggagtcaaacttaaggtactgctccaaacaaagaacataacaactacgaatgtcataatataacaaactttttgtatttgagcacatttagcatcagtagcatctattccatacgtagctctctgtttcataacaaatgacgaaatcataggcgaatgattaaacgagaatactatgattggaagtatcatccatatcgttcctaaatatcccgttcctgttgaagcagtagaaacagctgaaaaactaagcattgacgtattccactgtggaatcaaagatattgcgataaaaagtagagaagctataaaaggatacactagcatgctcatgatctttacagttatatcttgaccaaaatttagtatagcgataagaccgagtactaaaacaagcgataaaatggaccttggaggctccgacatgtgcaattgatgcacgataaagctactagcggtatttgtaagtgcgaccgagtacatcagcacgatcgtataaatggagacaaaatatacaatattaaaaatgatacttgccttatttccaaaatactctcttattgtacctgtaatcccctcatcggcagagttcgaagcgtaaatcattttagcaagcgccctatgtgaataatacataacaggatatgcaagtatggtaattaacagcaatgataataaaccacctgaacctgcattaatcggtaaaaagagtactcctgctccaattgctgttccaaaaaggctcaatgcccaggtagtatcctgtttatgccactttttagggtctagatatttctcattttttactgcagtgttatcagcttgaaattctatgttttttgcagtattcccatccatataataattcctccttgtgtcctattcttaattctctttttaagatataggaatatagaccgttcttgaaaaatgaatagcttatatagtgccccacaacgaatatcccccttctaggttaataaaaatcaaaaaattagcgaagcatcaacctgaagggtttgttaccacttataaaatattttaattatatagtagtatattttattgataacttccccaatatacagacatccttaggcgaacaatagagtaaagattgttaaaaacttcacaatatattcgataacttattgatttgattgtttctccccaaagattttatttttaatggaaattcctgtaggtgtagctgcaataccacctaaacctgtctctcttaattcgcgaggcatctgtcttccaactctatacatggcttcaatcacttcgtcagcattgatgagattgtttacgccagctaatgcgatgtccgctgctgctaaagcatttgccgttccaatggcgtttctctttacacaaggaatttctaccaaaccagcgaccggatcacaaactaaaccgagtaaattttgtaatgcaatcgaaaaagcttcagaagattgctgtggcgttccacccgcagcttctgccgcagctgcagccgccatcgctgaggcacttcctacttcagcttgacatcctccatacgctcctgaaatacaagcgttgtttgcgactatcgttccaaataacgctgaagtgaatagaaaatgaatcatatcttcatgacttaactgcaacgtatctttaatactaaataggactcccggaatcgtcccactcgcacctgctgttggagttgcacaaatagctcctaatgcagcatttacttcattaacaccgatagcactttgaatccctaacaccatcaaatctccagaaagagttttcctattttctcgatagtttttaatttttacagcatcccctccggtcaaacctgttggagaaaatacaccgtcgccctcgatacttttatttattgcatgttgcatagtcgctaaatttcgttccattttactccatacttcttcataagaagttttagtttgtttgatttcctgttcgattgctaattcataaatttgcttttggcttttattagctgcatccacaatttcttttatggccatatacatatttttcactccttaatgtgactaaagaataataagattagctatattgcttaaatctcctaattccttctgagcattacctggcaatatcgaatccaaagcgaatgcatataaatattttgttttatcttccaaactatgaaagttgttaatttccacatcatattgtttaaagatcctgcgtaaaacaaattcaaagtcagctctttctgaaatcgcaataacaactggcaatggcccctgcagatttaagctaaatccatcaatttcaacatttttgacttcaatcaacccaccaccgaccgaaacacccattactctaatacttcgactttcatcctctgcatatacatctgccgtatttggatgaccagcaggactattacccaattgttcaataaaggtaatgtcaattcccttagactctgctattttaatagcatctggcactttgctgtcatcagcagctaagcctaatataccagcaataattgcaaaatcagttccgtgacctttatgggtttcagcaaatgattcataatactttaccacaacttttttaggaagaccttgaaataatttattagcaactgttccaatagccaaagcacctgcagtatgtgaacttgaagggcctatcattatgggcccaatcacatcaaaacaacttttgtatttaacaatctttttttctttaatagatgctacattcatgttcatataagcacccccataatttattatttttagctgtagttgaatctaagttattagaatgatcgattcaaaacaagttttgtttgataacgctttctttattgagttgaataaacttcccttctaatccgctatcctccgtatagtaatcatatcagtatgtccaattttaaaaaattactggcaagttctttagaatttttaatccaaaacgaggtttgatattttctctagaggtaataaattgtgtctcgacgccctcattataacttgtatatttataagtttaatctttttttattttcagaaagattgaatagacagaattttgaataggtaataaattacacttagtatgtagcaattgtgtcctttgtttgaagctgtattagttagtaaaaaagcaaaaataacacagagttcctttcataaacacattgattatattgaaaaatcattataaagatacttatattgtcttttgtttgaacatcttattttgaacgggaaacctgttgcaataaataattcattcatatgaaaaggaatacattataaaatttaaaaacgtttcagtatattaattatacattttgtataaatattaattatcaaaaaaaactaacttcttattaggatcttaacataaaggatacattccaaataacaatggaaattctgctttatcaatttctttatacgttatatttccctctttacctgcaacagcaacttgtactttttcatttgttttcacatcctctgcacctattgcaccacccgccaataatcctgtacttaacagactatcgtgaacgaaagttagagagttatggaacaaaatataatgtgtatgtacatacatttcttttaaaagaagttttgtagtatgcaactgaattaaaaaaatatagatttttatgactctttttaggggatatagcaaagtgggatcttttatatgcacattgctataccgaactagatttcagtatagtatttttttgcaactcattgatttttaccaaacacgtataaaaaccaacaatatgaaaataaacgactggctaaaattttactttcaataaaataaaaaagaacctgcaaatttgcagattctcctgataatgatttatatgagtaagactcggaaatataatacaatgattcaaaaataagttcaagtaaattcaaagaacccgctggagttcgagttctttcagaagtgatgatgttttctaggcttagcaaagtgagaaaatacaagaatataatacatcgagatttagagaatttcaatatttaaattagaggttattttaatgtgatgtaacatcagcattttgaaggaatagcaatgaataccttatacattcccagtctacataacgctttattatcagtagaaagaaaaaggaaaatccctactttcacaataaatccgccttgctactctattcattttttgatacattcctatccaccgttttaggcttctcttttgtactgtgttagccgaaaaattgtataaatcataattcgtttttcttccacctgtttcaccctttttacaccctagttttacaaaataagaagtcatcaaaacttatatttattactttctgttatctcctctctcttgttctatgcatagtctatctaaatttttattagctactaaaaaaaaatttacaggacgattaaaaaaagccaagtgcattgcactcggctttatggtcgattaaacaattttacttcagacgtattaaactgatgtagatagtctttagtagaagtataacctgaattcatgagtgttttcttttcttcttctgtgatatcaaaattaaacgacgacgtaaagaatgtattaataaatacagtgcgggcagcatcttctttggtggtttttccgctctcatgacctttaatcatggtttgagacaaattccatgcaaaatgaataagagaatggccaatatgatgttctgttgaagttgcgatatgttttaacatggcaacctccgcctgagattctaaacggaaaccaagtgtttctttgttgtagacaatttcatctgtaggatcaaagaaagatgcattgtatttcgtgtgtaagcttcttagtgtagaatgatcctctatattgcttatcagtttattaacctcgtcaatcgtatctgtggtcgtgaagtgttcttctttattcacaaaacttttccgatcaaataaacgaattgggtagttatcgagtacacctccgtctacataataatctttatcccattccacagatttaaaaaagaatgggatggacatcgaaatccgcacagcaactactaacgggacatcaggtgtcgtttcgcgagaaaacgtacgaagttggtgtgtagaaacgttcgttccttgaaaaaacacgtcttttcctgttttgtcatacaactgctgaaaagttgtgtccttactccctgtccacttttcaacgatctttcctacccactcagtgaagaaatcccctttatagataccaaaaccatcaaaaaacaaacgaatgttatcttgtacaatcgaaaaatcatcatctttaaacgctttgaaattcatgtctttgtggattttcacaagatctgcgaatggaatggaaagacctaaaagtaatgcagtaatcgctccagctgaagtccccccaaatcgttgtatttctggtaaaatcccttcttcatttagtgcacggatagcacctatataagcgcttccctttaccccgccaccttcaaatactaagttacgaaatggatatgccattatatacctccaatcaagaaattttcgatctgttatagtatcggaagtatattgaaatatattccaaatggtattaagaaagtttcatgtcctccgatacgtatggccgaattatctttattcaatggataaattgtttgaaagggaagaaatttgcttgaaatggtaatttagttggataggaaacaggaaacggagcgcatctttggatgcactgaataatatccccttttgaaatcgtatataacgtaacttcttttccgatgcattctccaagtaaaatcacgagtaagaaatcaaggaacaatctacatttcataaatccctcactctctttaacatacaatccagtgaaataatttgtttcaaatacgtagaaatatggtttaaccagcaatcaatgatcaggtcttcttaccctaagtaaacctaaatctgtttgtctccatacagaaagtgataaatagttttgtttctattcaaatagtacaatatatgcaaaattacatatctaattaattgcttttaatgttatattttaatagcgatgaatgctattatttcataagttgtcaacaagcgttatgtatgtatgagaaaaaggaaggagccaaataggccccttcctttttctactaattaactaaattactctctggtaaaaatttaaatagtaatgctcatttatagacgtctgattatgcattaaacatgctagctttgcttgctgtcggaaaaattaaagacgatagtcaaatatgtcctttcattactttatattgaaataaataatgattcaaagttattttgtgaaaattacacaaaaaataccaattcgtcgtttacctaacaatagataatatagataaagaaaaaatactaaaggatatcacagtgtagtagtctctagtatcttttcatagtattttagcggctatgcaatacggagggataaaaaaaggacctcttacggaaagataagaggtcatcaaaaagataaaaatgttgtatttgaaacacgcgagtttctaattcacatcataacacaatatatttatatattcaatatatacattaaagataagtaatgtatgttcaaaaaacacatggaatattaatttgtaacagtatatattttcctcttttattctatttcttctacaatgccgtgattgtaacaaatatccctctttcttttttggatgattacgaataaaaatactacatgttttctgtctcacttggaataaagcatcatggtaaaaatacaatgctgacaagtaaaatacttaatacaatcaaccctatccctaacatcatccattcaccctttttagaattttaaaatttagcccttcactttcatatacttctcttttacatgagccaataagtccctcagcttattctctgaagggtgttcttgattttctggaacttctctgccataggatgaaaagttttgtgagcatgcactagttgttactttcaatttcgcgtatgaggatgtacgctcatcataactggattacgtcttcttggggataaaggggacaggaaagttgctaagctagcgtaaggtgctaaattccctcaaattatctcaaaatttggatactcatttaatatttctatactctccaacttataacaaaacacatcgcaaaatatttttacgatgtgttttaaaagggaaatcatcatcaagtttttcacccatatttttataaggagttttaccattgaggataaacgccttcatttcaaaacagttcttttcatttgtatacgatatgtctcacacatatagtatacaaattattacacttacttttcttcaccgcttgcttgcatggaattaaaagtccaatttaatttcaacgcatctccttgtacagcttttgcttgtaatttctcaccatctacttttgttaagcggaacgatggaatagatgcagtactttccccaagataacttgtaatttcaccatctacattgttatatacgattactgcctttgcgcctgcttccttagcatgcttaatatttattgaagaaaaggtgatgcatacaataatcaaatctaattaacatattatttaattatcggtagcgagattaaagagactccctactctcaggaagggacctccaattcatattattccccctatttctatgtttcttatttgattctaattaactaactgattagggttattgcaaatcaaaataataaaaccacatctccaattattagataactatctaatacattggaggtgcggttcacttaggtcattgatgtttcagctattctctttatttgaaaattacatctaccatattaatttaatattatattcctcaagccaactattaacttgaagtaaataatctattatacctcgtgcatcattacctgaaattacttcgtcttttccttctgcaatagcacgaactctttctacattaattaatggcaaaataggtgagaacatcaatctcaacatctttatcctcaactagcttatataacttcgtaaaattatcatctatttccattcgatgtgcttgcatttcttttctaatttcttttacctcactaccaatcgtatctactttcttatcaagttgatccaatttctctaaaatttttgttaatgcatcatccatatttaattctcctcctaaaattaaattacaaactaaacttagctaaattgttatccttattaaccacacttaacaaatctccttgaaccatttgttgttgttgtatttgcgtatacatttgttgaagtttaggtaactcctcaaacattgtttgttgttgtatatattgttccaaagccaaataaattaaagtagatttaggtacaccagttctagcgcttttttcatctaaccaaccattaacttctttagaaatacgagtattaacacgaaccatttcagcttgtggttttttatttaattcttccatcttgatcctccttgatgttttattaacaccaattttacatcaatagagtctataaaacaataaaaaaagccttttcggctaaatttattttctgaaaaaatgccaccatctttttttattacttgccgccaccattcttttcacttctagcatttctttcattaatctaaccaattgctgatctctatctccaacgcttgtttcaatcatcttagtttgatttgactgttcatttaatttaatagttaattcatcaattttattattctgcattaaaatcaattcctttaactcttcaatcgccttattatcccctccgttttcaggagatatatcggttataactcgattcttatccgaaataccaaactcttcaccaacaagtctacacgattcttctatagtccttcctggttccgccttaactaataataacctcttaaatacttctaaatcatattcactaaacattacctgtccttttgaatctcttaagaagttatatccggtatatctctcaaacatgccataatattttttaaaagttgtatgattaatatttaatgtttgtgctgcttgttttgttgtttgatatataataaccattgcaatcacctcacaaatttacattcgatataaccgatataactccttgttttataatttatataaactttataaatcataataaaatttcacgtcccgtattattccacaaaatcaaaccgtcctttttaaaaaaagggacacaaaaattttttattcgtgggatattcccacaccctttacgctcacagcgagtgtcccccaaacaatgtttgggagtacgcaatagcttgatttactattcctttaggcaaccctacgggacatcaagttttatttaaaaaactttttacaaatcaaaaaacttttctaaataaaactccttcgccttgctacggcttcttacaggctttccatttccatctaccgattcacatttcaaaccttccagaagtgattttgcgtattctgatgaatatatacatcgttccttcttttaatcattctacctttatagctgaagttatatcggctatatcttctataactcacaattagatccaactatatattaaataactctatagataactaccttgttaatatttttcatcctcttaacgcttaactatccctggcgcgcatccgcctaaggccgaatgcgcgccatacctaacataatctttagggcgtaagcactaattctgcgacaaatattaaaaatattttttctatagaatctctaaatatatacttatctcttcttgagaccccaacactatattcgtatttaaacctccaacgatcctgaatttagtcctgctgccatttcattttgatttttttataacgattacttggataaaaatcttaatacttcgccccaatatacttcaaaaaatgtcttccctaatcttcgccattcctcgctaattgccacaaacattaattatttaatctgtcggatctattagtaaggctacatcaaaacattagtaaaatagaccttataaatgttttgtgaccacaaaacgcattccctttttcaatcgtggtcacaactctgtacacaatgaaaaattattctatcaggctttgactgatacacgtagacacaactgtgtccctctccttatcctgcattttctttttttaatacaaaatatttaccagcttaaaaagccatataaacctttttttaaagaagagcataaggaaaccgaatcccattttataaaaaaagtgatgaaataggctgagcctattgggtttctattttgtgaattacgggatgcctttttgggctttgtagcccgttttgtgtacgtttaaagcacttttgtggcacgttttgtgtcccttgtagcacgctttacgcccctttaaatcaacgtttttttaacccgaaaaagtgggacgtctttttttactcatatgcgttctgtatgcatttttggtcattttatatgcgttttgtatgtgaaaaaaattaaaagtatgcgttttgtacgcgccaaaaatgaccactaaacgaccacgaaaactgggacgcctatttattaattggtggtcactgggtggtcattttttcattctgatggtcatttgttggcacttagtggtcactcagtggtcactaaaaatgcaccaaaaaattaaatttgtggtaaaataaaaacgaaattcagcgaagtttttttctgttcaccttcgcaacaacataaaacaaaagaatgatgattaattttggagtatccataccttagttggaactaaaaaattggtgtagccttaccgtagtaggcataaaaataaaaaaaacgatatgttaaagctatccttttgggtaacgttaacatatcgttttttttattcgctaatacaataatgcacatggctgctatgcattgatcctcatcaacctcttcttaaaaactcctataaaactattaaaatatacaacatttataaatggaatttcattttatctttcacaagaattatcaatctaaaagcaaaaaaaccaatttctaataacatattatatacagtgaaaacccattggaaacacattgaaactccattgattttctcatatttatgatatcacgtttttgttaggctttgtctaacctgtcacctttagtgatagcaaaaaaaccttatgctcttctataaataatctgcatttaatataaatttatataaaactatttcttaaatatattatctacctcatcataatcacgaaacgtcactgtatcttcacattgaatataaattccttctccaaaccaagcgaaattcttaccccaaatcttacgaaaaacttcaaacaaacgttcttctccagtatccttatccaaaaggactccttcaataatctcatcatcagtaaaaaccactacattttgattagttaattttttaatcttagattctaaaaatttgtcttctaacataataaaatcccctttgattttcattttttgtacgtgaaaaatacgtcttttttccgtacaatttgtattatacgatatttttccgtacaatacaagaagaggtgataataatgacagataaaaaagaaagagtagaaatgagaatcccacaatcaatattaaaaaaagttgacgaatacaaagaagaaaacggaatttctactagaacagcaacaattctagaacttataagaaaaggattaaataaataaaaaaatagaagggataatatacatatcccttctaactaatatctgattctatataataaatacgatcaatataatctaaattctcaatatagctcaacttgccttgagtgactaaaaaatctaaataactacaaacatgaacgtagatatgaggctttccagtaagataacgtttatctaaagagccaacctctttaatcataaattcacatagttgtctcacacttacagaattaacattttgtataaactgcaaaataaattcttgttcaacaaaacttaaaaattgatacgaaatgttcttctcaatagaaacaggtttcactttcacaggctgacttcgtatagtttgaacattatcatcatctaaattaaatccaaaaacaatgtcttcatcaaacaaagaagcttgtccttcttctctttcctcgtttatttcaaaatctacagaatcatttttctcaacaatattcttctttaatgaattataacttctcaaatcaccttttaatctcataacctgacgttctaataaaggtaaatctaattctaaatgctctctaatatctataggcataatcaaatcattaggaatagaatccatacctaagttctcaaataaagaccaaccagatgaaattttaatcaaaatttcatctaactcacaatcaatcttatacattcccttcaaaactgccttaacaatactagaaggtaaacctgtatgttttttaaagtgatccttactaaactttaaaattttattagtcactaaattcttaacaatatattgataacgtaaaggacgaccacactcacacggatgatctttcgaaacttttcctgcatcaatctactcaataaacatccattgagtagatatatgttcagcatcctcttcagattcgccaccttttaatctagctaacacactagagaatgctgtctgattacctctcttcaaaaaaatacgtaaatactcttgttgttcatcagacaaactacccattattctatccctatcttctggatctaaataagcaccatacataaacaacaaatccttccgaaaaattaaattaaatagaccatgctacaaattacatatataatacaattagattctttaacaatcatttcagtcttatgattcttcaacccattgaagaatctacatttttgtacatcttcagcccattgaagatgttttttttatatctaaaatcccatttactaaatcaaaaacattatttaatgttatattcgaaaccggttctggaacacaatttatcatagtcgataaaaccttttcatccggcacataaacttttatatttttcttcgctcttgtaattcctgtatataataaattattagtatttaatttcggctgactttctaaaaataccgccacattctcatattcactaccttgagatttatgaactgtaaatgcataagctggtacaatattaactgtatctaaatatctataaaacacttgcctatcttcaaaatccaattgaattaaaatacctttatcatcataatcaacaattttaccagtatcaccattataaacccttctagatgaatcattagcaatgatcatgactctatcaccgatttcataacaataatcattaaaacacttcgtaattttatccttattagcttgaactattaaattaattttcttagtcattttttttgtatttgttaaaatttgatacccctgttccacaagtggtaaaactagtttttctaattgtttttcatcatataatctaaaatcaattaattcacgatttaaaactttatatgcaagctctaacacagtatctccacttctaaaaacttttgtaagtcttatagtatttataaaatctaaaccttctaattcaggaattacagaagaatcattaacaggtggaagttgagcatcatcaccagcaaaaataatctttgtataactaggaacagctaataatactttcatcaaaatatctcttggtatcatacctacttcatcaataatcaaatactcacattctaagttattatactcattctttaaaaaattcgaattccaattagatgaacatgctttatgaactgtcataggcttgtattcggttaattcatgttgactcaacaattctttaattcgtacagacgctttacctgtatacgttaaaataaaagttgtacgtggattaggctttaattttttcaacaaattaactaaagtataagttttacctgtaccagctcgtcctaacaataatgtaattttattttctacaaaagattttaataactctaattgttctttagttaaatcagtctcatcaaaaacagtcgataacttatttttatattcagcaactgaaacttgaattaaacgctcatgaattacatagttacaatttataaaatcatctaaatccaatgactttgaaaatttcaataaatcaattgcatactgatccctaagcattacagaatgaaacttaataaaatcttctacactattttctaatacttttggaacctcataacttgttgcattaatttgataatcatatacccctaatttcttatacttagattcttcttcatctttttcatcaaacaacttgatacaattacttgaactaattaatttcttagctatatcaccttccttttccaattcagaaaaggtttctatagtctccttagtaacatatctagtaactttcgatacataaaaagaaacaatatcagtatctacagtgtcatatgtaagagttttatttctctccatagcatgatccacaatatacgcattatcataaacctcactcacaccttcaactgttatcttcttcattaaataatgagaaacataacgattacataaaaaatgataatgaggttgtccactttcatgcaactcaactaccctaataaacttaaaatcttcaaattcattctcttcaaaacgtcttaaaattcgttcgtacaactgtttatgtaatatttcatctcgcttattaacttcatgaatagccggaaatagctcgtctactaaatgattatatttcttatgaaattcaattttttgtttaacatttaaacccaaataataaaccttttttaaatttgcaacttcaatgattgcattttttcttgaataaattccaagttcaacatcaatatcaaaatctatcatttttttctttttcttttcataccattttaaagctttctcgtaactaacttttttacgtctcatatatccttcaatcgtaaaatcactagacaattctttacgaatctttttaaaagtcttctccagatcatcaataccatccttagaagtaatagtattaaaaaagaatagacgttcatgctgagaaaaatatttaattcgaagttgtaaacgtgctgcaatgaccggaccacatacagggcaagaaagctggttacaggacattcttcggatcataacatcaccagtagctttttcgcgtaaaacgatggtccgccgaccgcatttagcaatatctaaagccataaaaaacaacctttctaagaaaacgaataaaaagtgcgactctatccctattattattaactagttaagtagaaactacattaaactatgaatttacttctttactttatctaacttttctctatatctttttaaagcatcttcaagaaaaacacgatcttttactaaacactcaagattatctaaatgataaaaaatatagtcaatatcattttcaataaaagatttattacttaaatattgttcaatctttaaaaaattgtcttcacaaaccttttctgaagacaataaaatactttctagttcattaataacattcgcataatacgtttttaaatccataacaacacctctctataaacaattccacaaagtgtccataacaacacctctctataaacaattccacaaagtgcccatttacacagtaaactgttaaatatgttttattacattctcacaacgtttactaaagtaaatatcaagaatgtgcatgtaaccactccttaaaatactcaaacatctctttagaatcctcttcaaacattggcgaatcataaatccttatagactcaagaccctcataaaaaacaaaatgaactccagtaccattaaaaagaaaaactccttttaaagttagatcagaagatctaagatcatttgaattaaaatcatgagaaatatgattggattgagaagccaatttcataacttgctttgcaaaaaatccactcaataaaaccccttcaaaatcaccatcttcagttgtagaaatgctcgcatatttaccaggattcttcctaattaatttctttatctctttaatattttgcaagatatcattccccttaaatatcttctttctttaaaaataaacacatataattttaattcacatatgaatcctaatgtttttgtctctttaatttttcaactgttgtttcatttttaaatacacgtttattcagaacatcaatctcaacatctttatcctcaactagcttatataacttcgtaaaatctaactcagatttaataactacatctgtacgtaaaacatcaaatatttccttattcaaatttttcatcggcctgtaatcctccgcataaattccctttccatttcttttagggcttctttttcactttggattaaagttttctcagcaaaccctttgtgtggtgggtttggatttttacttgttccccagttttgaaatttcatataataatgcggagaattatctgctttgtcccatccaatttcaattgaataggaactaccttttttcacaactttccctatattaatagcatccttagcgtgttttccatctcgccatgattgttttggagttggtttttgcacctccggacccacaggagaatttctttctaagttctttttgaatacctttgctccagcttgtaatgattgctttgtgatctggggaacatcttgtcctaactgttccaaatccctaatccattcttctattccgaaaacttctaattctgccaatttgatcgctcctcacaaataaggcacatttccttatgttgttcgtcgatatcaataactgacttaatctcgtataacttcccatcataccttacacgcattgctgaattaataccttctcgatatcgaattgtaaagtttattagtttaataacaaactctgcatttccttgaaatatttctgatctaaagcctgtaccaaatggtgttttaggttctgcccatacttttacgaactctagccatttagacggatgaacatttccttcttcatcttttgtttctgatatttttcgctctagtatgatacatttgtttaattttgcggcatttaacggccgcttatatttaaagggctgcatattaatcaccgtctaacttaatttcttctaaggctttatcaatgctcaaactattaatttggcttaaaaaattcttatcaaaatactctaaggcatcgttataaacataacgagaacgttcaaagactaattctttgaactcttcatcattggtaatttcatagtcaccgcaaactcttagtaaagccttattagatgtaaaaaggatacgtcttaggttatggtcttcttcatcacctaaacgcatcctttctttaaaatcttgcaatatttcatctgaaattgttgcgtttctcatttacttcaccctttatttagtttttgtttctgcaggtggtgtaaatgaaatttctaaatcgtaaacaagagccgctttattatctttcggtttcccattagcaaattgtttaattgtataaagggtagcatcttcgaaagctaatgtttgatcaaattcttttagcttgtatccacctgcgattgcagcaatatattgtccttttacaaagaataatgctttaccaacaggaacttcctcacactcgacaggtttaatgttataaggcaatgccattacccattgacctgttgcggtctggattgtattacgtgcttgtacgccaatcgcatcaatcgggttaactaccattacaattttatttaatacttttctggatttcccttttgcatcaacagataaagcttttactacttcataaagttcgcctgctacaattacccctttatcagacggagcaaatgttagtttaccagaagattttttatcagtaacagcgcctgtttctggatttacatctttcattaaaccaactggttgatgtgctacagatccgccaccattaataaagccaaattctagaccgactgaatatgtttctactaaaacagttcgaacataacgttcaatccattccgggccaagttccttcatatcatttggaattgctgcaaatgcagttaatttaagttgaccaattttttcttgtttgaagatagcatcaatttgcccacggatttccccgaataattcgccccatacatacgccttcgttgcatcagagtaaataaacttcgtaactgctcctaaatcttgcaaaccaatttcagctaataagggatgttctgtaactaaatcttcaaacacacgctcttgagtcgttacaggaaggattgagccatctgtaaatccaccttctttaacaactgcattgaagaattttgtttctgctgaagttaaaacattttgaccacgttgctgtaaaattgaacgatcaagcatatcgttatttacttgttcacggaccgtatttgctacatctgtttgtagtgcatcaaagaaaccttcaaacgctgacgtttgttcttgttctgtactttctgcgttagttaaagtgtccgtcaactttgcttttgccttagtaaatgcttcagatttattaaatttaattaccattgtgtgtttcctccgtttttttataattttaaaaggagccctttaatcccactgttttttacaggtttaggattcggctcctttggttgttcttctatattgttttgtaaatcattcaggatttcattttttaatcctgataatgctgcatttaaatcttcttttgtaattccttggcctttgttcatggttccatttctaaagccatcgattactttctgcggaagcatggcagcagtagccgttgaagctgtcattttaactggattctccataaacatgatttcatccgcgaaattgttttctaatgcttgttgcggacccatccaagtttcttcagccatcatgttaagtagttcttcctcagatttaccacttttaatgacataggcatttacaatagctcgatctgttatttttaacatctcggctgccttttccatgtcacgatgatctccaccatgccacttagcagcgttgtgaatcatgatttttgctgttggagaaattcgaactttatcaccagccatcgcaattacagaagctgcacttgctgccaaaccaacaatttgaacttctacatgaccaggataattttttaatgctgtgtaaatttccgaaccctcatctacataaccaccaggactattgattgatacaattaaatcctcactatttgcgttatccagttgttttgtaatcttacctgggcttgtagcatccatttcaaaccaatcataaatccaagcttcatcattcgaaataattggtcctttaacgtcaattttcaccgtcatttgtattctcacctccttcagattcagttagtttcgtatagtttttcgtaatatgatgtgtatttaagttaggatcatcagaaacttcatatcctacttctaatcgaatctcattccctgtaaatgcacttgaagaaatgagtttatcgatgcttgtcgcaagatcaaatatactttgataagaaacagctttaacttcaattttttgacctgaaagatactcttcttcttcaaaaaatttaacgtttgcttcatcagaaatcttttttaataaaggtttcactgtgaaaagcatataatttttcgtttgcttctccacatcagccatctcgccatatatcaaagcagttggaataccaaaagccattgctacttgatttaagaagccattcgttactttattgatttcctccacactctgaccagaattccctccgccagatgtttcagcatacttaaaacctggttgttgtggaataagagcaacgtctttttctccaattgctttatacatgttatcaatgaattcttgcagtttggcttgatgtttttcactctttgcagcaagcatatccatatcaactgttccgcgaatttgattcttacgtttttgagaacttaatattctaccgaataaatcaccataatcagtaaacaaaccatcgataagaggtgataacttatcattcctgtatcttaaatgaatgacttcactttgcttaaaacttcgcttaaactgataatcttttacggtgacatttgtaaaagtatcttcaaacacagcatattcattatgttcaaagtcatcagcaataagtaaatcaccatcatccgcttgtataatcaaagcttcattatcataaataagtttgtaaatgaaactctcccaaaaggtacttgctgtcatattcttattcggtctgacatttaatcgatagtaaagctcatccttttcaaattcttcaccatttttcactctaaattctgactgactaattgttctccctaaaaaggatatacaggtatcaatcgccagtcgcttcatgtgtactctattggctttctcaataaacatttccacatcaaacataaatcctacttcactatttcttttaaatactgcatctagccatccaatgattatcaccccctttattagaatttaataccatctagcataaagtcgaattcatccacaagaatgttatccgcttgccatagcgcatgaataaaagcttgaaatccatctgttttacgcttaaattcatcttttttcagatactctttgttgccgtcttttttgatgtggacgtagacgttgttagtgtaccaacgcatcaatggattatctccaaaaataatgcgattgtttgcaaacaacgtttcaactcttggtgctaaaagagaatgtattgcctttggattacggatatacaacaatataaatccttcagcttcaagtgccgttttgacaagatcaaggcggaatgtatcggctacaatcgtattaacaccgtataactcacgcatttttacaaaccaatctacaatgtgagagatattaataactggttcatccacaatagttagtaagccattttcagcccattcatatataggtgcttttaatttcaccttgtccaaaaatcctttacgtacaaatgaatgacctttccatatataatcttcaccatgtttaaagagtagaccaaccgcagcaaagtctttaatgctggcgaagtcgagtccgcctacagctactttatgttttaaatctggaacctctctgagcgtttccccatcttcttcaaaaccagtacgcatgatttcttcccatgaagctacagactttgttaaatctgtttcaggataattcatacgttttgttatgaattcttcacggtttgaaggattattttctaattgtttatattgagttaatacctttttaaataattgtttagcataagaacttctcggctcgctaaacatcggattcgctttttcccatacatcaggattatcaatttcttctggattatctatcttgcaaatgaaagggaataatggatcttctaaatctttcccctttagaatattcatcgcccgctcttttgttttgtccaggaatccatcgcggacaaagccatctgtaccaataaaaaattctctagcatttggcacttttccaagtccactagagaatacatttactacatcaaagttttcatatcgatgtatttcatcgtaaataacacaaccgtcacgaagtccatccttagaaccagcattagatgtatgatattgaataatgctttgcgtatcgttactcagtatctctaccttggttcgataaaacatatcttctagtatttcttttcctttaatagcatcatagacttcacgaaaagaaactttggcctgtttctcgttgttcgccacaattgaaacattgtatcgatctattccgtgcagcggactaataaagaaatggcataatgatgaaattaaaccgtttttaccaccaccacgagccatcataattaaaaattgctcgtaaaaaacagaatcatcttctttatagaaaagaaaaacgaatgctgttaggaacttttgaaatgcttgcaattcaaagtaccatttctcagtgaattttatatagtcctcatgcatttcattatcgaaatacaaatcatcgcgtattaaaatgtatttctccaggtactcaattagcattatgcgctctttattcagcttaattttccctgcgcgatacatctcaatatattcagtgacataattattttgaatcatgttaaatctttaactgagcgcacaggttttgaaggaactttcttttcttctgccgatgcttctaatccaagtgcatctaaaatctttatcattcgatcatttgttttatgtaaatcattaatagaaggattggatttcggaccatgcatgccagatacttttattcctgtttcttcaatatcatcaacaagaacacactttaaatcccacaacgataaatagtcttgaattaagtcagtataatgattacctacaatctttttttcttttaattgatttgttagatccttttcaatcctttttctcattgtttcacgcttcactctagccacaatatccctcccttctgatttacatcgttttccaatttaatataacgcgcgaatttggttctaaatttgaaaaatcgaccccctccccggtgcctcgttccccgaaaaagattgaaatattttaagggggggattgtttctgaatcagttttaccacttttcatcgttttcccatttattcggtttcttttcgaatgttctaccgtgttctttattatggcaatccacacagactgtttcaagattgtctatttccaatgcgagttctggatgatgttctagttcttttttatgatggacgacgagctgtatcttcttacgctttgcactctcactgtactcattggtatctgtttgtactcgaccgttacgtttacactcttggcactcatagttgtctctcttctttacttgctctcgtatactcttccactcaccactgtcatagaacttacgcttctgttgtttggttttgtattctttcataaccgataaagctccacttggtcttccacaataggatgattgtgctgaataacttcagtattgaattgcttattatcagctggtacatgttcaatatgaatgtatgtccgattaatcctatcaatcgattgtgattcccaatcaaatgcaacacgtaactttctatctatctgtttacctttgtaatgaactataggtttagcatctatatctgttaatgtaattgttaataaaggttctacagtctcgttagattgtttgtacttctctaacttaaacatatctacaaacgcaccattacatttcggacaaacagttacttcttgatattcatcttctggcgcttgataagttttaatttgatagtcacaagctaaacaacatctagaaacattacacatctatcctcactccttaattgctcgacatttaatagaatctatagattccgctctacgtaatgtttatccacccttcatcctcctccaaaataaaaagccgctatctatatcgatagcgactgttcagatattaactattccctaatctcttttaatccctgtaacaaatggttcaagcacatactttgcagtaactcctgaacttccatcaactttcacttctacggtctcaattgaagatacatgtagaggatttattgaaaggttaaaaaaatgaacaaatcccttatacaattcccctttttcatttgagatacgactcataaagtcttctggatgaacatcaaggtcatattctttaccactgtccataataacttttgtatgtaatgttctagccatacttacacacccccttcccatcattctatatttcgacaaataaacacaacatccttttatcgatatataatttcaaatgtatagagaacgttattatttacaataaattcgcatacggtaaatgaagttttattcttctctcaactaacaaccacgacagaaactcttgtccgacttatcaggtctcctcattccgtctacctaggatgttgttagctcaaagaagagcaaaagctctccttaataacggtatcactcaatcagtaccatctgctggtttcggattttatgtgccatcattacgaatcgtttagaaatttagaaacaacatagtgagttgtgttttccgccacttctcacaatacaaatataacacggtatttccaaaacaaccggtacatatcctgccaaaaagcggtcacgactctgccacttattttttcttatcaatatcctcacttattctttgcaactgttttgcccaaatcagtggtttttggcaaccgcttatctcccctgttctttctccaatgagttacccatatcttgtattgtgtgtaactgaccccttcgccaaatcccttgatattattgacttaattaaactttcccttttgagttacacagtacgaaatttatgagtaactgtatagatttaaaaagaaaaataaaaaatgcacctccaattgttagactgtgtctaacaattggggtgcacttcaaatcgttagaaaggccttttctttttgcgttaaaacagaaaatgcatgtaaatttactttagattttaatttaaatgttattatatatggtatatatgattaacgctgtgaattcgagattcatattgttcattttaagataagattatgtagaaaaaatgtaaataattagcaaaaatatactatttattagttatatttaatgttaatatttgtaacgaggatgattggcgagggctgattaaagtttcactttatacaaaaaaggggcatgagggagaaggttatagccaattgtatagaactgaatacttccgtattaattaaaatacattgattactagatattaaaaaccaccgggggagattagagtgaagtcatttaagagagtacttatagtagggatggcgttgactacagtatcgattttgggagcttgttctagcgatacagacgtattaacaaaagcaggagcaaagcaaccagcgaaggcggaaggtgaagtactaaaagatcagaagaaaacacctatgactacgagcaaacgtgaaagtattaaaaatgaggatgcaccatcatcacaaaagcgttatatttctcatgatgaatctcaaaagattgaggaaggtatgacgtatacggatattcttaatacgattgactatggtggtgagaacataaaacattataataaccatgaaaaacgcgtattttatactgaaaaagatacggatggtacatatgaaattatggttgaattaaatacatatggttacgttgtaaatattgaacgtactgctataaaggataaagataaagataaagagaatcaggtatttacgaaacgtagtgaagagcctgtaaaggaatatgaagaaaaaaacgatcgtgtaccgtggtataaagatgtaaataacaattcggcagcagtaagttacaatcattatttgaaaatcaaaaaaggtatgcccgcgaatcaggtaaaagctgcaattggacagccacatgtgattgagaaatataaatcttattcagtatatgactatactggttatggtggagaaggatcattacgtgtaatctttgaaccgaatggaactgttacggatatagtggaagacagtttaccacgataataaattagttacgggaagaattgtagtaaagttgtctttgattttataaagtttttgggagcatctccgaatataggtgaaaaaataattctcttagccatgttaactacagtattagtatttaccgaagtttcttccaaattcaatagcgttatcgtggatgttgttgtcgtattatctttgttgatatataccgcagtagggcagaaattgtaactggacgcggaggagtagcagcttccttttaaaagaaggaggaaaatatgatggaggatattcttgaatttatagggagatacgtaattaaacctattattagtttagtgagatatcttgtaatagagattataattgagggcataatagaaggcgtaataaacggtataaggaaattacgtgataagtggcgaaattggcgtgaaagacgttattggcggtagtgtagctgatgagcgtgagaaacaaaaacgttatacagaagcttaatggaatgacaatttctaaagtgaagaaataattattatcttacaaaagtgtaatgttcatgtcatgtttttgaatttcttctttaagctccgggctttaagataagaatataagaaaaaacatatgaggtgaaggaaatgaaaagatacattgcactatttagtattttagttgtatttgcaagtttgttagttggttgtgatttaaaccgtatgggtaaagatgagtattatgttcaaattacagtagatggaaaagaatttgatagtaaagctagtaatgggcagaaatttaaagattatgaatataagctgactggctttgataaagacggtaaagagaaagaattagaattcatagctcaaaaaaatcttcgtaaagaagcattcctacgcgtataccactcagataaaaaaggtgtaacagcttgggaagaagtgaaaaaagacgagcttccagcgaaagtgaaagaaaaactaagtgtgaaataagacagataaaaaggaattgacgaacagggtcttttctaaagttgtaatatcaacgatttatagttaatcggtaacggtttggtaacaattatagcaaatctttttccataaacgcaactacttctgcttgcttcgaaggatacaaatggctataagtatttaaagttgttgctacatcagaatgccctaatcgctgggctacaaccagcgggctaacacctttatttattagataagaagcatgagaatgtctaaactcatgcattacaatctctttaaccatagcaatctttagatagttgttgaattttttatgtaatgaagttgtggcgagactatcatagaattcaccaaaaacaacataatcatttttaactggtgctgttagtgcagcatctttttttatactttttaataaattcattacaaagttaggtaacataataattcgattagaagctttagtttttggttctgtaacttgacgattgtatttagttttgtgaatgttaatggtcttttcttcgaaatttatatcttcccaagttaaagctagtagttcgccttttcttgctccactataataaagagttgaaaagaatgctttatacatgggctcatctaccacactgataaactgtttaaattcttcgaattcccaaaagttaattcttttctttgattctttttgaaaattcccagcaattcttgctggattggttgttaaaccatgaaattttatcccaaaattaaatattgctgagagtgtagtgtggaatttttttaaatattccgcagagtattcattgatcattttgttttgatagtccattacatgtctaggtgtgatacagtcaattttcatttttccaaattctttcattaaatgattgtagatggcattttttatggtatttattgaagattgtttcctcctctgcgtataccaattgaaataactatctgcaacgtgctcaaatgttagattggagtttgattctttttcaactaacattttagcttctgcttcacgtgcttctttttttgttttaaacccacgacgttttacttgcttggttgtcccatcaaactgacggactcttactacgaagaaatatgtacctcgtttgtcatccttatagatcaccataggggttcctcctttatataaagagtgataattcaatttattgaatagattatagcttgtttgttaccaaaagaaaagatgtcccaatgagaacatcttaataatggatttaagtttgaagaaataaccattggtaaacggctaattttatgttatgccatttgttaataaaaggagtcagtccaataaaagaatccgctgcaatctgcaacggattctagtcttagaagtttgaagcaactaagacgttttgtgatggaaattcgattataacatatgacgtttaaaaaccaaatggaccttataggatttgaacctatgaccggacggttatgagccgtctgctctgaccaactgagctaaaggtccttgtatgaatagtatatcagcgtgtacaaaaaaagaaaaggcacaatcaatatgaaagtgtcttttctttcagcttaatattcctttaaataaatagaggtgtacctcttttatcaggatgtaaacacaacctataaaacagaatcatctttaaatccagattgttagcacacacaataaaaagaagcgaggtaaatatttagataaacgctatgtcactagtgcgattgacatattacgctcttaataataagagaatctgatttatagaatgtatccacgttttttattgtactacttctattatgtacatggtgtattttttggtgattatgcaaaattgcattattgcagtttctataaaacacaaaaaaagacatccaaataaggatgtctacgaaattaaaccatcttacttttaataacagaagagtaagggaactcaattattattaaaccatcatattgataaaaacagaaaggatacttttatattatcatatagtgctatctgttaatattgataaaaaataaaagctaatttttgggaaagagataaaatttaataattggctgggtgtggatttttcgtaatggctggttttgtatcactaaaattgaaatatactaacaaaacaatggaggaatgggaaacaattgtcattttagagaaacaattgttgaaaaaatcaaaaaagacaattattttaaaggggattgtgttatattgggtgcgtatatccaattatggaagagaatttgcagtttcgaaagtttatgaaattaacaaaataatattattgaacataaatatagacccatagaagcgtgtgtacaagtgttgtgaccacaattacaccgttccctaaccgtaccttaggaaacacttgcctcgtatgagtccatcttattatatcatacattagcaatgttccttattgaaaaataagttaggatggaaagtttatgttcggagaagggggaagtgaatttgcaacatgtaatggatcagttgttgaaaagaatagaattttgcggatattcaagaaggaattttgctgagaaaatcaaagtaagtcgtgaaacattcaggagaggacttacttgtgaatatgaaatggatgtagcagtattttttcaatccattgagattttatttgagcatccaactgaaaaaagaaaaatcataagagaatttttcagtatgtgtgaaagtatctctaacattgaagtggctttaatatattgtcaggttcaaggtgaatataatctgatgcaacatttaataaaaaagcatgaaagtaaaaagaatttaggaattttctttagcatatataaactttttaataagaggaataaaaatgagttaaaaggacaggcactgcacgatgaattgaacaagcggcgtttttcttcgaatccacattgccaggtgatggtaaatatactgtatatgctagcattagctgataagccgaataataacgccattattgaatatgtagacgctgtagaagcaaatttaaaaaaaatcaaaaaaggtcatattaaagattatcttagtatgctagcaaatgaaagaaaagcatacatgtatctttggagagtgcaacttgatgaatgtagggaaacatgttataaaataattaactcttccctagatattccaattgtcaaagcgacatcattatgttgcgttggtgaatcttaccagttcgagtcgccgattatgtctgaaaagttcctagaacaatctattaaaaaattagaagaagttaatgtccctgtaaaaactcaaaagtatatagcttttcaaactacattggcgcatgtaaggataactaacaatttaaacattgataagattgatgttacggtaattcatgaaaatgaacaggctaattatgaatataactatggtgatagagagttaggagtttcaatgtttgaacagatgaaaagaaaaggatttactccttttcaacgtctttcttattcaaaatgtattggtgatatggaaggaattaaacaagctctactcgaatttgaattagcagggttaagtttttatggacagttatgtaaggatattttaatgaacaaaggggaagtgctacaatgaaaaagaatttaattgcacttttaatgtgcgtaggggtattaggattcggattatttggagaagttaatcagctagaaaaaacaaatccagttcagtatatgatgactgatcccggcggaagttaatatagttactataaaaaagaaagtcgctacttcggtagcggctttcagtgcgtttaaggagtgacacaaataaaatcacacgtcgtaaaactgtgtcgcctgatttttgattaaaatgaataggaggaattttaatgttaaacactgtagaggtagatgttaaagaaaaaataagtgagttagttgaacttgcatataaaggagatcaagaagcaattgaaaaaataatcaaaataaaaaaagaacttggtggaagttaatctgccaagttctttttttatagatcattgatcatatttataattttgcttcgtttatcagcaggaagctgattaatacgtttcatgatatcttcaacatcatctgttattttttttgatgtttcttcatcaaaagttttatgctttgaaagccccataatataatcagcggaaacgtttgtaacacgagctatattttctaccgtttccctactaggttcacgtttatttgattcatatagcgaaatcattgtgtagtttacaccgacagcatctgcaagttcattttgtttcatttttaaagatttacgaacctcttttatacgactacccatagtttcagacattattaaacctccttttaactttacgtttatttctctctttgttatatataatgtacaataaaactttgcttaaagacaagtttttttattttttttagaaaatatactttgcaacaagcaaatttaattgtacaatgtgtttaacaaaagaaaaataaagagaaaaagataaacaaatactttgcaacaagcaagtttttattatcaaaacctttgcttgttgcaaaggtttagggaggtatatagtgtggataatgaaaaagacttatctgctcgagaagcaaaaaaggcttacatgcgagcctggagagcagctaataaagaaaaggttaaagcaactcaggaacgatattggaagaaagtggcgcagaaaatgaatatggaagaaagtgaaattaagaatgattacaatcgcaattggtatcagaaaaataaagataaaagaaatgattacatgcgagattattaccaaaagaaaaaacaaaattcttaaggtaactgaaaaaaggtgataacaaaatgatagaggaaagcacgttttcattaatgatagttgcaatcgtgatttgtatagtctctttagcagtttgttttttggatgagccaattgaaaagtttataaaggatgatgatagagatgtataaaaacctatttattgttcgaagagaacatcgtatgacgcaagaggatgctgggaagttagtaaacatatgccagcaaacgtattacctaaaggaaaagggaaaacgtgattttactcttacagaagcaaaattactcgcacaacattttaaaacaacagtagacgacttatttgcgaagtaactggaggggaattttaatgaaaaacggtaaaaaattgacaaaacgtgaaaaaatgcaccttaaatcatacaaattgaatcctgataattggttaatttttaagaaggtagatggcgaactacatttagtgcatcgtcatacgaactcaatacgagtcattccaagtgcataggatggacaagcactattaaaaatgaggagggtattatatggattaattaacagtagcaaacgaattaaatattttaggacaacaatatattgctggttatcagttcaccggaattgagggtgggttcggcaaaggtaagaaagctatgttagttaaggaaattgccatcattcatgataagccaataaaagaaattaatcgtcgtattaatgaaaatcgtatccgttttatggacggaattgatattctcgatttaaaaagtggtgcttttaacccaccacaattattaagtcttggcttttcaaatatgcaaatcgcaaaatctaataacatataccttctatcagaacgaggatatgcaaagttattaaaaattctcgaagatgagactgcatgggaattatatgatcaatttgttgatggttatttcaatatgagagccaaggaatatcaacaacaagtgcctacagatccaatgagtattttaaagcttacttttgaagcgctagaagggcaaaagcaagaactcccaacatatttttctacataaaagtatctttttccgtttgctttgtaatttgttaggaatgccaaaatgataatctcctcttagtttttttagagttaaaaatacattttaaaagattaaattttaagttatatatttaattttaactctaaggggttaaaatttcaattaaaacaaataaaattaaataataaaacaatatattttatttttaaggttaatattaaatgtgaatatataaaaaataaccttaatattatttaatttatgttttatttgtataaaagtatccttgtaagtaaaatggtatgtacattgaatgaaaaggagtatgaaaaatgaaggtagtaagtaatattcgtatgattatggcgaaaaagaatatagataatatttcggatttggtgagaataacgggagtaagtcgtaattctattaataagttgtggcacaatgagaatgtgtcttctttaaaattagatacattgataacgatctgtgagaagttggatgttgagttattggatttaattgaatatattcgagatgatagtgagacaaaataatttaggggctattttagctttagatagcttgtgtatgatgaaagcatatttttgctaatcgacaatgagttatattcacatatgttttttttgtagggctatatgtgtatttaaagttttgatttctatttgttattgtatgaatatggtttgaatgtggtaaatgaaattatagtcttgctaggtgcgtcaacaccttggaagatgagcggtactggcatacttcgtgatttcattgatagtagtgcagtaaagtgatggaattgatgagtattgaaaaagagttcctgtttgggggctctttttttatttgttactaagtatttttaaatagtgaaggtgctacactatttaaaaatacagaatattaaaaactttatatatcaactgttgaaaagttagtcttatacaatagcatgataacatgatagaaaataaaatatagataattttggaaaaggagaagattctatgaatgttcaactaggaaacgaacaaattacaaaattattaaatgattggtatcaagaaattcgagcgcaacacattattaaagcaaaacaattaaaacaaaagattgaaaaagaaattaacaacatagaagaagaccaaaatttacttttatattattcacttattgatttgagatacaagattcttacaaacgactatgcagatagagaacaatctttagaaaaaatcgaacaattaaaagaacacacaaataattttttagattactattatcatttctttaaaggcatgcatgcaatgaaaacaggaaattatagtgaaactcaaaaatattatgatatagcagaaaaattactagaagaaattcctgatgaagtagaaaaagctgaatttaattatgctgttgcaactttctattatcatactcatcaagccttattagcaactcaatatgctaacaaagccaaaagtttttttagtgggaaactaggatacgagattaaaaccggagcatgtgaaaacacacttggtatggcttgtattacattaagggaattttctgttgcagaagaatacttgctttccgcaattaataaatttgaaaaacacagtgaaaacaaattagctttaatcgtacgttataacttaggtcttttatatgcagatcaaaatctttctgaacttgcaatccgttatcttcttgaatcctttgaaaatcaagaagacgattacaaaacaatgtttttattagcacaagaatattacaagttaaaacaaacaaatacagtaaacacatatattgaaaaagggctaaatgtttgtaaccaagaatataaaatttatttcttatttttacaagcattaaacaataaattatctactgaacaattagaaaaagtcatgttagacgcgattccatattttgaaaaacaaaatctatggaaatacatacaagattatactgaagaattggctataagattttatgaagaaaagaataaggataaatctaatgaatatttttataaaagttacaaagctaaaagaaacttattagaaagggagtcattgaaatgatgaaaaaatttagtctgatactaataggggtagcatgtacaacaggtattttcttttcccaattcaataattccattcaaacacatgatgctaaagaaaaaaatgatattattcaacaatatgcacatggaaaagatatttaaaagcaaattccaacaattagcaatcgacctaaatattaggattattaacaaaatattgaattatatgtaaattaagtttattatctattttgaataataaacttaaggggatgaaatttatgaaaaaaattagtattgagagaagtaattggagaaaaacatataaaaaaatgattccagtattgttagtcggaggaatattggcaggaaatgtagcatttgtgacaaataatgtttttgcggcaactacaaataacaacaatataatacaaacgaaacagtctctcgtttctggtcaagatgaaaagagcattaatgaattagcagaagcgtttcaatttatgcatgaagaagccgctatatataataatcaaggtgaaattgttgattttgattttaataaaatagaagcgaaatatgggaatgatgttggtttagatgcacttaaacaacaaattaaaaaagataaaagtgatattgctggtttatcttttacaagttgcatgaaagatgctttatatgacttttttggagtaaatgctgtacaagccgcatttaatggtggattggcatattatcttgagaaaaaattatggaaagaagcggctaaaataggcgttaaattctttataggaagtagcgtagcaggtttagcggctactttagcttattatggaggtaagtgtgcaatttatggataaaagttcaattttaaaacaaatgtattttattttatttccggtaacactttttctatctctaaatatttatcaatggattgttaaaagtgattactcatttacaggatatataatccaaaatttaattattgtagcattagcgttagtagcagctatcatagcttatttaattactaaaaaaaatatttaacacataatgttagtctaaataacagaaaattctaacccttattcttattttgtattatactggttatgtacaggtaaaatggtttacaagttaatttttcctcgtttcaaaaaaagtccattcttttcaaaagaatggacttttttcttgttatatttgctgtaactattaaaagggcatcaaaacgatctacaaaagcctcaagacgacccacaaaccatctttaaacggtctcaaaacgaactacaacccgaaaaaacgcatcccagtttttttaggtttaattttaagcgcataccaagcgcatataggcgcatacgggacacatacaaagtgccgaaaaacgcatataggtcgcatacaaacggtagaaatacatccctaaaaatagagtgatagaaacccaataggcacagcctatttcaccactttttttgcaaagtgggattcggtttccttatgctctttttttatttttgctttttaagggtcttataatcgtttttaagtattttaggatgttgggtttcttaagggaactagaagttcctagaatggattctgagcgttctgaggtgtatttttctatggattcgatattggaattgctctaggaatagttgtcgttttattctgtggctgttccgacagtggttctcataaagaatatgattgtatcaatagatttgatgatgtttgaaaaatagagaatagttgaagctcttcctgtaaaacaaaaaaaattatgtttgtagaggaagtagtcatttcactacaagaaaattcccatagatcggtggcgagttgaaaaatgttgaaggttggcgaggacattttacgaggacgcgggaatggctttgtcattgttggggttaatagtttttaagaaaagttggttagtagctgaaaaaaatagggaagattggcgaggatgtattgcatggcagcgggacatgttatgtagtcgtggtgaatataaaaagagactttttaatacatggatgtcaactgtaaaaagttagaggtagttgtatgatgtttgtccaacggtaagcggaacgaagtgagcattaaggagtggacgaacccactgtgcccagaaccctcttggaactccaaaacgttagccgttttggggatgccaaccggcgagggagtccctcaaggattgaggggttggggagttcgattgaaaggggtcaaggggaagagtttcccttgtgggtttgggcaaagcccatgattttttttgccatgcttgttatggctcggcggtagccgaaatgtcccgaagggcacacgtgtttacgcagtaaactgtagtgtgctactgtttacatggaactacccccgaaaaaaaggagcgaggcccatgtcgaagttcgtgatttgccatatgcaaaaatttaagatgagagatgtgaaaggattacaaatacataatcaacgtgaaaaagaaagtcattccaattcagatattattcaagcacgaacggaacagaattatgatctgattcatgacaaagaaaaagtggattataagaaattaattcaaaatcgaattgataatggtgttgtatctaatcgtgcaattcggaaagacgctgttgtttgttgttcgttcatgatttcggctagtccggattatatgaattctttatctcaagtggaacagagacgattctttgaagagtctcttcgttttttgaaggggagatatggagaagagaactttgtgtatgcttccgtacatgttgatgaaaaaacacctcatatgcatgtgggtatggttccagttaatgaaaaacaaaaactatcagcgtattcattttttaaaaacaaatcagagtttcatgatttacaagataaaatctatgaacatgtgaaagaaaagggatttgatatagagcgtggtgtttctagtgatagaaaacatttatcgacgcagcggtttaaagcggtgactttacaacaagaaatagaagaactagagcaagaaaagaagggaatagatagtcgtcttcatgatttaaaaatgtctttagatcaagcaaaaagtgtggatgagatcccagttaaagaaaaaggtgggtttatacgctctaaaacggtcgagattacctcggaagacttcgaaagtataaaagtattagctaggtcgtcggaagcccttagagaagatgttagacgccttaaaaacgaatcaggtgtaattacacgtgaaaaagatgggctgtatagagagaaatgtattttagaggggcaaataacagaattgaaaagagagaatcgaggattgaaggaagagaatgatttctttaagaaaacgttggaacgagtgaaagagttgtataaagaaaagcttcctgaattggctggggtgattggttacgttaaggggagtatattggacaggatgaattgcaaatttttaaaacgatattttactagtgatgatgaagtgagaggcgctcaaaagtttttgaatcataaacaagagcatgaagaacaacaaaagagattaaaacaagtgcgaagtagccaacagaaaaatcgggaccagggattggagagatagtgtggttctgtttgagttttttgttttttagatttatagcgttagcggaatttgttttttataacttgcttaagatgagtatgtttctcagatgttttatccgttaaaaaaaatggttttgaacgaaaaaaaatgcccctgtccacggagtggatttaggggcatttttttatgatttttcgtgttcgaaaaatcgagttttttctttctttaatacataggtaactatttcggcaacgaaattgatgcctatgtattcttttagcccttatgtatcaagggtttgtaaaaaaaaagacttgctttttcaggcggatagatttatcatttttagtgtcgaattaaaaatcataaataccacgagaggagcaagtccaaaaaaaggattcgtacacccttttttatatcgaatatgaaattcagaaattagaaattctgatgtttttcagataggactaatatatcaaatatggcaaagaaaaatcaagatgaaatcactggtaaattacaacctaaaaagaaacagaatatcaagatttacgaatttataaagaagaaaatgagtgagagcgggaaagaattgtttaaatcgtgcagtatctttaatgaatttttggctacaaaggataaaaagaagaagaaacgagtaaaggggaatgattgtaaaaatcgattttgtccgatttgtgcttggaggaaagcagggaaggacgcggtgaaaatcgcaacgatgatggaagcaattaagattgaggaaaagaaagagtttctttttttaacgttgacgactccaaatattaaagctgatatggtgaaaagtgagattgatagatttaataaagcttttaaaaagttatttgatagacgtaatattcaacgttctattaagggttatattagaaagctagaaatgacgtatgataaagaacgattcatcactgaagaaatgtataacaacaaaaagagaaaagcatattatgattctcgtggattgaaagtagacgatcataacccgaattatgatacatataatcctcattttcatgtattgctttgtgttgataaaaattattttaaacgtaaagagctttatattaagcaagaagaatggttagaaatgtggcgagaagtaacagatatgccagagattacgcaagtacatattcaaaaagtagagttaatacgagaaggaaatgcagttgcggaggttgcgaagtattcagcgaaagactatgaaatgtcggttagtcaagaagtgtttgacgtgttctatttagcattaaaaggtcgtcaattaattgtttacggtggattattaaaagattatgcgaaaaaatatgaagatggcgaattggacaagtataagagtacagacaagaatgaatattattatagattaatcgcaatgtggaataaggatttaatgaaatttgaacaagagtatcaagagttatctgagagtgagaagcaagagtataacggtcatttaattaatgaagtagatgtggaggcgtagtgtatgaaagtagcgggagatttatattattattgtcttggttgtaaaaagtttcatgaatatgaaaaaattgatcataaaggtgtaaatagaaaattatgtttttattgtttcaagattcaatctaaaaaaacgaaaattattggtgatgctgaaggtagaatgcaaatttgtgagacttgtcataaagaattgttttagttggttgatttgtgaaaaaagcaaagtcaaatgttagaaatttttaataagggaactgactgttatatcaagtcagttcccttattttattgagtctatttttgagtgcagcaagtagcattcaaaagtttttttatgatttaacaaaaaggagtttttcttaaatttaaatttcgtgaatttgtaaatttatttttaaagtttatttcgagatatattttgttctactaattttgttttactaacgtacgaggtgaaaacttaaagtgtgcgcatgaatttttttagtaatatatattacgataaaataccgcacgttttttgatgatttttttgaaaatatagttttgagaaattctaaattttcggggctgattttggattttttatgtgggatttgattttggaatttgttaaattggaaatctcgatttttcgattttcggaatttttgttttctcttttctttgttattctgtatttcgaaattaaggagtttatataataccttcatgacgaactgaaaacgaaaaaactttgctcgcatatttaattcatagatatttcaatcttctgcaatatctagtaagacttgcactgaatttgttccaccttctcggctgcacacttccaacatttcatggaagaaaaccaattctctaaagttaaacgtttcattgaatcctctaaatgcacgatgcattgtggttccaccttctaataaaagagaaactttctctatttcttcttgaatgctttcatgcatcattggcttcacctgaactaacacccgttttgcattgttactaatttgaagcgcattcgctactgccttcatatagatagatagacggtcaatgacaaccaagtagtaacgtttttttcttcgatagagaagaaatcttggaactaaaaatccacataaaacggaaattagtgtaaaaggatctcgtccaaaggaaaaatagaataccgccgcaatactcattccagaaagaatcgtatatacccagtacatgcctttcgtcaatttccactcgtacttttgggcttcttggataacggattgcggtagatacacccgtatccccttaatattccttaactccaagcgcctttcttctttctcattttcttgtacaaattgggaaagagcagaacccttagattttgcaaaaagtaaaacgagcaatactacactgataaagattaaaaatatacatccataagccaacaaactatgcatactgcacctcctgttgtgaaaggaatggcgcataaagagctggatttacagtagaagaacggaatttcttctccatttcggctgacatttttgctgtaacgatatgatccccatgaatctttcctactctctcatccatttcatcgaattcctcacctgaaggaataaattgagaaagctgattgaactgtatatcatcttgataatctaacaattcaatcatctctgtaatatagcgattaccatcatctttcttttctaaaaagacaatcacatcaaatgtctgagaaattaattcatataaatactgagcatcgatattcgcaccactctgcagacacatgagcattaaacgtctaactgcttcttttgcacttcttgcatggacagaggtaaagccaggatgtcctgtttggaagaagttaatcattttcaatgcttctttccccctcgattcccctacgattaaacgttttggtccttgacgtaaagcatttgttaacaacctatcaaaatcgattgcattttcttcaacctcggatgccctacactgcatcggaacaaaatgatgttccggaaaaatgcgatgcaaatataattcagggttatcttctactacaagagtacgttcttttttctttcctttcggaatgtgagaggcaagatatttcataaactctgattttccggtacctgtagctccagcaactagaatattcattttggctttcacagctgcggccaaaaagttcagcatttctttcgatgcttgattggtagttaacatacgttcttcagaggcacggaggtgatctgcattcttacgaatcgttattgttgttccgagtcccccaagttcatctaacgcaatattgatacggatatacggaaacacgcagtcaacatatggctttgctgtatttaatgactctgatgtactgtttaccatcttataagctagagctttcacttcttcttccgtctcaaatcggtaaggaaatgtacattctccctccccaattttttcgtaaatgatttcttttgtgccattgatataaatatcagttacatctttatcttcttttaaaggttctataatcccaaaccccacaatttcgtcacacaccatatttagtaattgttcagaaggtacctctgaaatgacaacctgattactcaataaaaagcttttaataatttgttctacagctgctctcttttctttattcataaaggattcacttaggatatcacgatggtcttttactaaaaatgcacgaatttcatctgtaatatctttaatttgttgagctgtagttgttcctaactttcgagctgatttggaacgaatcatgtaaccaaagtgatataaatccacttgatttcgctttaaggcgatttgtttttcctgtaaatagccccacatactccttgtcccccttttaatttcgtaaaccaaagagaccctttttcatagaggattgctgggatggaataccaagaccagctgcttccataatgtgatggacctttgtattaatttgcggggaaccaaattgcatcccccattcgtaactcgtacgatctctgtcatacggaatggttactgctattttttgagaagaaagcttttcaatatcttctacataattttcatctgccatgttcaaaacatgaatcatacgaggcattgttagctttgcatcttcaatcagctttaattctcgcttaatagctaacgcaccacgaggatttccgtttagcacatgaacaacaaggtctgcttggtataggattggataactcagcacctcggataattcagttggcaccgatagaatgatataatcgtattctgtgtccacaagtgactccataaatgtagttacaaacaattctttgttttgaatctcagggaattgagctaagttataacctgatggaaatactagaaaatccatcttatcgtgtaatttttgcatcaaccttggattcacttttttctctagcaaatcttgcttcgtacaaatatactgcaagaggttgtaatcattttcttttcttacaagctctaatatatttttactatcgtggctaagaccagttccaaccgcaaagcttggccttacttggtctgcttctacataaagtacctttttccctaaatgagctaactcatttgccatcgcaatacttaacgtgctttttcctacgttttcatttgtggcataaaaggcaaccattcttacttgccgatccatcttaaaaactcctttcttacttagattcgctcagatactgcgctacatactcttttacatttttagaaattggattggtcgaatgcttctctacatagtctaaaatgttcttttgatcagatatttgcgagaacccttctgctggttctaattctttccctgtttgttctattttttgtccgactgcaacaggaatcacatctccaagtgtttttgcacgatttaagtattgaagttgttcaggtgaaacagctagcgtatataatcgcgttactttgggcttttgttttccttcttgttcttcttttgattctttcttttctaatacaaatgcatcttctgtattgctatcttttgcggccgtaacacgtacacgttggaaaagaccaccaaacacaactttctcattgtcgccttctttcacaacctgtttgaaatacaagtcgacatacgtgttcggaatgatactattacctgaacttgtttccaaatcaacgagtaacgggaatgcaacttctccatcttttaaatttaaaatggcagagtcaggtaactcttctttctttactactttgtttttaaagagatagctattttctgtaatgggctgcccatcatttgtccacttacctactacttcttttttatttgcacgtaatacattggggggaatcgcatcaccaggtaatgttcgttccactagcatgtcttctttaatctctgtatgcgcaggtatatcctttgcggctacaacaatctttgttggttttactgcattttcgactgcgaaatgattgtacccatagatacccgctactgttgcagcagctaaacctaccgcagcaatctgcttcttttgaaacttagatggcttcaatgtttgtattcctccttatgtagcctttaaacgcaaaaaaaggacacacctatggcataatgcgccttaggtgtgtccttttagctaatctaaagtctatatgaaaatgttggatttggtttctttaatattacaatttcaatattatgatatatagagtttcatgtcaatcatttctaaaaaaaatattatttttaccatttcaaatctctgatcccaaaacttgaaaaaccttaaaaacgttgtcatatcaaggtttttaagctattaacccaactataaatatggtataattaatataacgtaactgaatatttcagggtggtcggttgctatcctttctctttcattttatggagaaaggaggtgatcgaatggatatacttttcacgatagcaattgagatactgaaagtaattgctagagaagtcgctgtattttttgcaaaacgagtaggtaaatacctatcaacgtcttggaagcaaatacaaaaaaagcgacgaaaaacgaaaagaaccacccacaatgccggcaagcgtttgaagggtgattctaagaaaaaataaactcttttttagcaaccatccaccttgcggtagcagttacataaggcgaagtgttaccagcacttcgtctttattagtttatgcaaaaactatctttataatacttctacacatattataacaccaactatagtacctgtcatgtatattcatccactatagctagttaaataaaacaaaatacttttagttcgaaatcaatttcgttcctgtttcaaaatactttgcgggagcataactcttcccattccgatcctgaaattcgcttccaatgtatagcgatacaatcattgcgacaacccccataataatcgcacgtctaacacgttgttttttctttttatccactctaatttcccctttctatgaaaaaaaggcacatcccattaagggatgtgcctttggtttatccattcagctactagtttatgatggatatattattgtgtcgattcatcaaattatactatattttatttttatttcccagtcttcatgtaataccaatcagtcaatttatgaagtagttcttctttccctacccagttccatcctactccacttcctccagggaatggatcatcaggaaatactcttctttttatgaaatcatcgtacgcaacacccttaatctctacttgctcagttaaacataaactcatttcattgatacctgctggagctgtttctacattaaaagtgtatacaccatcttttgtcttcaatggtgaataccatttttggccaccatcaataattttctcttgtccatcccaatataaagacttagttggtcttttactatcaaaaacatgtcctgttgcttcagataaatacatatttttaggtaggaacttcgctgtattatctttaagttctttcttctctaaatcttgagtagcctttaatccttcgtctgcaaatggatattgtgccttagcagcagcaaatacaccagggtaatttgcattccagtcatttttatattttccgtttacttcatacgaaaatccataaccagaatgtagcttagaaggagctaaattatcaatactccctgtcaaagtttcataatacatttccccagttatatcttcttttgatacacgttcacttactgtttctactacaccttttacactcgttacaccacacattgccttttcttttgaaggctcatagattgctgttttaataggattatttttgtatgtagtttcctcgatgtctatacggttaccagcagggttaatttccgcttgaattgttcctttacctttatgttgccagtcaagattcagggttttcttttctccctcagttaatcttaccttttgtaaagctacttgttgtccgttatgttttaacacaactactgtttcaggattcgtatatttttcttctaatacatctaactttttaattttattcttctctttttctaacttctgtcttgcattatctagcttacttgccgcactatctagtttattttcttcccaagagcagtctctatcataatagtgatcctttccctcggcatctacttcatgaattggattacggcgacaataacttagactagattgagcgctatctctctccgattcagagctatttacttcttgttgagacttattaatattgttgtttacctttgctctatattggtcacgttccggtttaaaattatcacgtgatacatctattcttgtttttatattctttccttctcttgctgtttctccttcaattcggtcagcagagaaatcgattttatatttaaaatcatcgtcatcacctggatctggattaggtgttacttctgtaccacagttaccatttatggtgaaatcaacagttttctcatttgattccctttgaacagcatcaatgactttaattttcgcagtatatcggccacacatttgtggctgccactttagttcttctgacttaaattgccctgcatcaccttcatttggtttttgattatctttttgcggagttgaacgcagataattttcttgatgatacacggtttcgccatcttttgtaatatctaacatccatttaactcggttccgttcacctgcagctgcttgatatggatttactgttgtgccatttggatcccgatcattatatcctttatttttacttacatattcgaatccgttaaatgtaaatttcacaggtacatctttttttccactcgtagccttaaaatcttttatttcaggtttacttgtgcgtacataccacaagttatacctatttacaccatttacactaccagcccctgcgtatcctccagaaagataggcaatatccctaatccaatagaaatgtccataagattcaaaggaatcttgatttgtaatcttatgtggaattaaatattttaaaacaaactgagagttaccccaatatttatccgtaattatgctatttgtaattctctccacttcagttaccattctatctcctactacaactgaagggttaatgtagccgtcatttgatatacgcacataaggctctgactggtcttcattatggataaggttttcccttggattcccccaattaaaagaaccattataaacagcaggaaaatgtatatcagctttatattcgaactcttttggcttatatctacttccagacctaagtagttttccctttaattgtaattcgtctgatgctaaaatcgtagtttcatttccattataaaatggtacatcactatttcctgcacttgctactgacggtaataacaaaattaaagaagtacaggttaataatatttttttctcagtttcataaaatccctcctttaaacataaaaaaggacacacctgtaccttgggaggtacgtaaggtgtgtcctttacgtaaataaatcaaatttatttatttattattatattacatatattaatatatcaaatgaagcatttaattgcaatgatattatacacgtacttgaacgtacatcatgtggtcagctgtagaatgccctacacggatcttatattttcctttttcatagttatttatttcttgagcatctacagtttcttgaatttctttatctagaactaaatcagaatttaacatcgtagtccactttttagctaattcaatagttgcttcgttattatctaagaaaataattttaaaatcattctcactagtagcattaacatagacttgtgccccaattgtaccttctggtaaatacatgtttttatcaattattctaatagttccatttaaatctgcatacttaaggttagtgccatatttagcattcacactcttgataagattttgcgcttctgtagaaatggatttttgagcaatcgggtttttcatagcgtttggattatacgtaacttcttctgtaactaaacctttatctaaacttgatggtaaatttgtatctggtttttcttcaggttttgtttcaggttttggatctggcttcacttctggtttttcttctggtttaggatctggcttcacttctggtttttcttctggttttgggtctggcttcacttctggttcccgccataccacagatgttccagataaatattggaagctatatacgtactttgtttcaaaatgggtcaatcgagaatatcgtcaactgtttactaaaaatcagtttcatcaagcaatgaaacacgccaaagtaaacaatttaagtaccattacttatgagcaagtattgtctatttttaatagttatctattatttaacgggaggaaataattctatgagtcgcttttttaaatttggaaagttacacgttactaaagggaatggagataaattattagatatactactgacagcttccaagaagctaaagaggtccctagcgcctacggggaatttggggtacattgaaaaaggaagagtatgagtattcaacatttccgtgtcgcccttattcccttttttgcggcattttgccttcctgtttttgctcacccagaaacgctggtgaaagtaaaagatgctgaagatcagttgggtgcacgagtgggttacatcgaactggatctcaacagcggtaagatccttgagagttttcgccccgaagaacgttttccaatgatgagcacttttaaagttctgctatgtggcgcggtattatcccgtattgacgccgggcaagagcaactcggtcgccgcatacactattctcagaatgacttggttgagtactcaccagtcacagaaaagcatcttacggatggcatgacagtaagagaattatgcagtgctgccataaccatgagtgataacactgcggccaacttacttctgacaacgatcggaggaccgaaggagctaaccgcttttttgcacaacatgggggatcatgtaactcgccttgatcgttgggaaccggagctgaatgaagccataccaaacgacgagcgtgacaccacgatgcctgtagcaatggcaacaacgttgcgcaaactattaactggcgaactacttactctagcttcccggcaacaattaatagactggatggaggcggataaagttgcaggaccacttctgcgctcggcccttccggctggctggtttattgctgataaatctggagccggtgagcgtgggtctcgcggtatcattgcagcactggggccagatggtaagccctcccgtatcgtagttatctacacgacggggagtcaggcaactatggatgaacgaaatagacagatcgctgagataggtgcctcactgattaagcattggtaactgtcagaccaagtttactcatatatactttagattgatttaaaacttcatttttaatttaaaaggatctaggtgaagatcctttttgataatctcatgaccaaaatcccttaacgtgagttttcgttccactgagcgtcagaccccgtagaaaagatcaaaggatcttcttgagatcctttttttctgcgcgtaatctgctgcttgcaaacaaaaaaaccaccgctaccagcggtggtttgtttgccggatcaagagctaccaactctttttccgaaggtaactggcttcagcagagcgcagataccaaatactgttcttctagtgtagccgtagttaggccaccacttcaagaactctgtagcaccgcctacatacctcgctctgctaatcctgttaccagtggctgctgccagtggcgataagtcgtgtcttaccgggttggactcaagacgatagttaccggataaggcgcagcggtcgggctgaacggggggttcgtgcacacagcccagcttggagcgaacgacctacaccgaactgagatacctacagcgtgagctatgagaaagcgccacgcttcccgaagggagaaaggcggacaggtatccggtaagcggcagggtcggaacaggagagcgcacgagggagcttccagggggaaacgcctggtatctttatagtcctgtcgggtttcgccacctctgacttgagcgtcgatttttgtgatgctcgtcaggggggcggagcctatggaaaaacgccagcaacgcggcctttttacggttcctggccttttgctggccttttgctcacatgttctttcctgcgttatcccctgattctgtggataaccgtattaccgcctttgagtgagctgataccgctcgccgcagccgaacgaccgagcgcagcgagtcagtgagcgaggaagcggaagagcgcccaatacgcaaaccgcctctccccgcgcgttggccgattcattaatgcagctggcacgacaggtttcccgactggaaagcgggcagtgagcgcaacgcaattaatgtgagttagctcactcattaggcaccccaggctttacactttatgcttccggctcgtatgttgtgtggaattgtgagcggataacaatttcacacaggaaacagctatgaccatgattacgccaagcttttatttgtatagttcatccatgccatgtgtaatcccagcagctgttacaaactcaagaaggaccatgtggtctctcttttcgttgggatctttcgaaagggcagattgtgtggacaggtaatggttgtctggtaaaaggacagggccatcgccaattggagtattttgttgataatggtctgctagttgaacgcttccatcttcaatgttgtgtctaattttgaagttaactttgattccattcttttgtttgtctgccatgatgtatacattgtgtgagttatagttgtattccaatttgtgtccaagaatgtttccatcttctttaaaatcaataccttttaactcgattctattaacaagggtatcaccttcaaacttgacttcagcacgtgtcttgtagttcccgtcatctttgaaaaatatagttctttcctgtacataaccttcgggcatggcactcttgaaaaagtcatgctgtttcatatgatctgggtatctcgcaaagcattgaacaccataaccgaaagtagtgacaagtgttggccatggaacaggtagttttccagtagtgcaaataaatttaagggtaagttttccgtatgttgcatcaccttcaccctctccactgacagaaaatttgtgcccattaacatcaccatctaattcaacaagaattgggacaactccagtgaaaagttcttctcctttactcattttaataaacctcctttctctagaccccaagaagctaattataacaagacgaactccaattcactgttccttgcattctaaaaccttaaataccagaaaacagctttttcaaagttgttttcaaagttggcgtataacatagtatcgacggagccgattttgaaaccacaattatgatagaatttacaagctataaggttattgtcctgggtttcaagcattagtccatgcaagtttttatgctttgcccattctatagatatattgataagcgcgctgcctatgccttgccccctgaaatccttacatacggcgatatcttctatataaaagatatattatcttatcagtattgtcaatatattcaaggcaatctgcctcctcatcctcttcatcctcttcgtcttggtagctttttaaatatggcgcttcatagagtaattctgtaaaggtccaattctcgttttcatacctcggtataatcttacctatcacctcaaatggaattcactggccgtcgttttacaacgtcgtgactgggaaaaccctggcgttacccaacttaatcgccttgcagcacatccccctttcgccagctggcgtaatagcgaagaggcccgcaccgatcgcccttcccaacagttgcgcagcctgaatggcgaatggcgcctgatgcggtattttctccttacgcatctgtgcggtatttcacaccgcatatggtgcactctcagtacaatctgctctgatgccgcatagttaagccagccccgacacccgccaacacccgctgacgcgccctgacgggcttgtctgctcccggcatccgcttacagacaagctgtgaccgtctccgggagctgcatgtgtcagaggttttcaccgtcatcaccgaaacgcgcgagacgaaagggcctcgtgatacgcctatttttataggttaatgtcatgataataatggtttcttagacgtcaggtggcacttttcggggaaatgtgcgcggaacccctatttgtttatttttctaaatacattcaaatatgtatccgctcatgagacaataaccctgataaatgcttcaataatccatcctccaaagttggagagtgagttttatgtcgcaaatattaatgtttctggtgaaccttatcaaattttcgttgatttaatagaaacatagcggtaaaattagcagtaacttaatagaacggaaatgaaaaaagccactctcatatgctattggctaccaacctttagcgagaatgacttaatcctgtacagccatacaggacttcgacttataagaggcgccaacttcaaataagttatttgccttgttttcgcgaacaaggcttattagatacacctattgtaccgttactctacgaatatttcaactagtaattactagcattgtcatatacataataaaacggatataaaagggcgttttctatacctagaagtcttgtaaatgtacagggcgtttagatatagagaacgccctttttgtgttccgttccagtggaagctaccactttaaaaagatggtctagtgtagccaatgcaggagagtacactcggatatcagttgtcgttgcattcaactgtctgacgtaagcgaggtaaaggacacaagccttgcataaaacaagcctacgggatgtaaatcctaataatgatgataaccaagacgttagcggcaaaaagtgttgggggttcaaaataagacatgattgtgcgactggagttaaacagttactcgtaagcggcgatcatgacactgattcacggctattcttgtacaagctagctttattacaaggatatgcgggttatatagcgaatcacccgaaagggaacggtgttgggcgtgagaaacgcaccgtacggcgcaatacaatgccaataagctatatacggacggtatagtagttttgtaagctataaccgtttgtcgtcaatgcaaccaatctcaattcgagacctcggcatctaagccagtacgaatgagtgggcgttttaacctcgtaaattttcaacaggggttactatgcccaaaactacattcagatttcctaacaaactcgccagtatgaaaaccttaagaccttaaagtcaagggatttgaaggattttaacctcgattagcaaaaaatgtagagtactgaagcaactaccattaactaagatagtgggggattgaggaagaatccagagctgtttaaatcaagtgaaagacaagatgaaattaaaagaatagtgaaagataggggagtggttctctatgagaaaggaaatggctagagaacaaaggcagcggtttattgatctattgttagactttatggtaaagaatcctcatttatttgttaatggtacagaggatgaaagtaataatgttgttacaaaatgtaatagtgatattaaagaggttgcggagtcatatttaactcttttatagtgagagggttaaaactaattaatatgtattaaggcccaatgttggaattattgtatttcactaggcaacctacttactaaaagtaagattatccattagtggatgttataatattgggttttttaacacaataatcatcgcctttcggtgtcgtttgatagaaaagtaaccattagcgatgaaaaagtcaatataaaaagccatccgtaaaaaacggatggcttaccgtacataggatcgttggtagggcggcgtatcctacatctctggtaacttacctagccaatcaaatgcttgagaacggcggttagataagcgcgtggggaacctttcccacctcaaagatcctatatcattattatgttactttctacaggtagtataccatgttcttatattttagtaaactccccgttagcttaacaggtctttgtaagcaattaaacgtccactattcaatcgtctttggattttcgcaggaccgttttttagatcgaacatagttgataagaacaaataaccgcttgggtccaactttatagcaattagtatatggtcatttaaaatctttaccaattcaacgctattaggttctttaggattttgcccgacatagtcggggtgttcaacgatatcttttatgtgcgatgaatatttttcataaataccaggatgttgtttctttacgtgctttataaatccgggaaacatttttacatcgttagaagtgcaagtcaagttatatgtatctataatgatttgtggaagttttgccacaacagttggtttatttacaatcttttttttattagccgtcaaatttctccctcatctcgtctctttatatctttattttatcataaaggagtatttgaaccgtcgcgcgggacaggtttatgatagggatattttattgaataattgatggtataagggactttcatgcttggaaagtggggattatgaattagatgcttgtccacaatatgttccaatgtaattaaaatttatgttcccaccttgaccaaacatcacgtccatacttaaatcgtccctcctttaataggtaaaatattaatttaccttaataaaaaaataatggataatagtattcgtctgaatttatataatcagggggaactattgatgctggggatactatttacagcggcgccatctactgatgtcgtaaaggatttgcaagataaagttatatcattgcaggatcatgaggtagcgtttttgaacaccacgatatctaatatgttgatccccgaagcaaacttaagagtgtgttgatagtgcagtatcttaaaattttgtgtataataggaattgaagttaaattagatgctaaaaatttgtaattaagaaggagggattcgtcatgttggtattccaaatgcgtaatgtagataaaacatctactgttttgaaacagactaaaaacagtgattacgcagataaataaatacgttagattaattcctaccagtgactaatcttatgactttttaaacagataactaaaattacaaacaaatcgtttaacttctgtatttatttacagatgtaatcacttcaggagtaattacatgaacaaaaatataaaatattctcaaaactttttaacgagtgaaaaagtactcaaccaaataataaaacaattgaatttaaaagaaaccgataccgtttacgaaattggaacaggtaaagggcatttaacgacgaaactggctaaaataagtaaacaggtaacgtctattgaattagacagtcatctattcaacttatcgtcagaaaaattaaaactgaacattcgtgtcactttaattcaccaagatattctacagtttcaattccctaacaaacagaggtataaaattgttgggagtattccttaccatttaagcacacaaattattaaaaaagtggtttttgaaagccatgcgtctgacatctatctgattgttgaagaaggattctacaagcgtaccttggatattcaccgaacactagggttgctcttgcacactcaagtctcgattcagcaattgcttaagctgccagcggaatgctttcatcctaaacaaaaagaaaacagtgtctcttcttgatgttgcctaacttttttcaaaatgtcctttacaaagggtacagattatattaagaggactttttttctatttcccttatttttttccgcaactgtttgccaagtgaacatgctcattaaaaatgttgttgttaatttgtttttcatatttctttaattcttcattgattttactgccagttttactttcaaaacttttctctaatttagctgctatatctcttagacttgtttgtaattcatgaaatgcccctatgtttttttgaagagcatatgtatcttcttttataatatctattgatttaaaccctacttctgtttttaacatcatacgctgcatttctctttcaatctgttttttagcagcttgtaactcctcaacaacctgactcgctaaatctcctgtcacattttcgatttgcttttctatctttttaatttcccccataaaatccatcatataattatctccttatctaaactgaaaattccccgctaaatgattatctttatccctaagtgaatttgctgcatcactaatttcatccccaaatctacttaaacttttttgttcttttcttaaaagatgaattaattcttctgctatgtgtacatcgtgaaaatagtcatttccaccttctttcgttttggcaattcgtgagatggcttcatctatttcgtatgcttctaatagatgatatttcccacctggtcctgtttcatattttaattgacttttcaacttttgaaccgcttcagcttctcttctttgaaactcttctatattttttgctatatctaataatcgattactgagcatttgaattttttgtgcttgtcttataatatcctcaggttctaattttaatagggggcttccatttgaatgaaatgctcctctaaatgtatctctgccgtgtccgtccatagttaaacgtgtaaaaaaatcttcttttgtatcattctgtctcactgtaaattgcttaccaattagaggtgcaccgaattgagtatggttaccaattgggtcattctcatgtgtataatccgtagctttgttttccatttcccctctatctactcgttttttcgcttcaggacttagcaaacgataaggatttggtgcagcccatgtagttgcataacaatctaattctgcagcgataaggtccgcttctgcaccacctttactatgtccagtagtatgaagagaagaagggttatattttgctacgatgtcattttttgcccattttaatccagtatcaaatgatgtttcagaattaggttttatagtttgactattacttggagtaattactttagaatgtgttttaattccaaacgaaatctgatcgatatctgtttcgaaatctgctaattgcgtaggctctgtaccgcgaaatgctaggattatctcatcataatgtgttgcattttctttgtaatcttttttcggtactactgcaatagcttctaatccattttttactttttgacaatctgcatcaattgattctataactacccatatcttaccatctaccccttttatttctttacctttttttaaaacttcgtcatcataaacatgatctgctaatttgaaataatcttcatccgttgcaataggattctttttaaattcactcatatctttcaactcatttcatggtatattttaactatattcaaatacaaggggattttttatgaagaaaaaattagtaattattttatccattatttgtattatagcaggaggatattttactatggaatacttaaaacaaaaagaaaaagaagaaaagttttggaaggcacaagaggcacgagtagaaaagtatattcattacaatattcaagatgtaaaatcgattacatttaaagaacacagtgtaagtccaatgggtgttcccagattaaaaggttatataaataataatgaagaattggattttatagcttatattagtactacagaaaatttcgaagatgattttacacgttctggagaacttggaaaacttataaaagaccctgaaaagtcggtatctgaaattgaaaaagaagagaaggaaaagaaacaagagtagtctttgtgattactcttgttttttattatagaaaaataaaatatttgaaagtttttaacaatgcattataatatatttagtaaaattaaccaatttatattttgctcattatgtattaaaggggaaatgaaaatggctggacaaattcgtatgtcaccagaggagcttaaatcgaaagcgactcgatatggacaaagtgcaaatcaaattgaggacattttacgtcaactacaaaacttacaaaatgaattaagaggagaatgggaaggccgtgcatttgaaggttttgaccaacagttcaatgaattaaagccaaaagtacaaaactttgcacagctattacaagaaattaatatgcagcttaataaaactgcagaggctgttgcttctcatgatgaagaattatcacgtaatttcggtttgaaataagaaatgttgtaatttctacatgaaattcttggaaaatgatagaaagtagactagtattcataagtttacattcgaagatacataataaaaaacagtagtgattttatacactactgtttttttattgtttcttgcaagtgaattatttatattcctgtctatataatttaaacgaataaatagctccaataaaaaatacaaaagcttcaaataatataaagatttgacggaaattctcaatatctttaccaactaaagaaataaatatagcattcattagaatttgagtagtaaacatacgagaagtaatttttaaataaatagcatttgttctttcatctggtttaccaatttttttgtaaataataataagtgcaattactgaacccaaaaatagaagtgctgtaagtcctacaacgatattaaaattggctgtactttctaacatccatttatttaatagatcaatcattattatcttcctttcctacataagagaatatttcgttcttctttttcactataataaaaaaagaaaaaggaaaacatcgaactttcttacaaacattcgtgtattcttacagttttgtcattttgtaaatgtattcatcgccttgcctttcactattttctttggaaaacatagtgaattacgagaaagagcgctacaagatcaacttccaagaagtagtgcactaaaactcttaattaatgcaattagtttgttttaaagtagtaagtggacaatacttcttagttgtagaaagtatcgagatccctgtgccaattccagcgtttgctgcagctctattaattggtttaggaataatcccgctttgttcttaatttaaggaattacaaacagttctacctttcaattgataagccctcaagtgtatgaatgcttggaggttgcttataaaaaaaaagacgccataaggcgcccccacaattgggtagataagactttagttttccaatctaaagaagttttgtatcagctctttgagagtatatcataatattcggttcatttattatgcatttttacatacctattaaaatacctctattttccatttgataaagtatattaccaaaattcaaataaatatttctgaaaattcaaaatatttacaaaaatcacaaaagtgatacatttaaggtgcaagttataaaaaactattaaagggggatttattatgttcaagaaattagtagttggagcattagcagctggtatcgcattaacaggggggatcggggctgcgtcggcaagtacagaagatacaacaaattcaaaaagcctaacgatggcgtattcctgtcctgattatattggtaatggtaaatatgcacaaactatttataacccaggtggaacaaatgctgtttatgcaaacacatatactgaaatgacttgtcacggaaaaataaagtggtattttaaatggaaaaaagcagacggtggcggttactacgaaggagaggtaataaaataagtttttatgaaaagcctcaatatctgaggcttttttctttgtataggattatccctcataaaaaaagacacccaaaggtgccttccgacttgaaccgctttaattttaataatatgtattggactctcatccaaatattattttactatgttaagtattattggtcattgagaaaaaataaaattactcataagagtgcttattcttcaatctaatgttttttactagattttttatgtcctttatttcgttcacaagccacgccatctccatcacgatctaaatgcgaagcataagctgggctatctggagttatatcatagtaaccggcattatttgcatctgtacagtttgcaaagtgtactttctcttgctgaggtgctgtattagctgcagctttttgttgctcctgttcttttgcttcacctgcttcttgttgtttcttttgttcttcctgttgtctttgagcctcttcttgtttgcgttgttcatctaatcgcttttgctcttcagcctgtttttgttcctcagcttgcttttgttcttctaacttcttttgttcctcagcttgcttttgttcttctaacttcttttgttcctcagcttgtttttgttcttcggcttttttctgttcttctattttcttttgttcctcttcctgtttttgctcatctatcttcttttgtttatcttcttttttagtttcttgttttggttcttctgatgtatttgctttatcatttgaaccacaagcagccaatcccataagtaacacgctgcatgctaaagccattaataattttttgcgcataatttaattcctccaagatatatataatgtaatatttctggacaatcttatcaaaataaacatctgtatattgtcatatcgtgtcgaatgagaataaaaaagatagccataactctcaatggaaaaatgataagaatttaccgatggatattagagcaatatcctctattttttactaatattaaataatagtttttatcaaatctatcgggagatgtggttttaatgtggggtaggggtgtgtatcaaaaggtgtaccttttgggaatgttaaattttatatttttataaacttaataccatattaaggtgatagtagattgtaagagtgataataggtgtagatttaaaataaaattcgattatttataataaagatagataatttgtaataaagattgataaaagaacctgtgttgatatgatcttagggtcatccaaattacgtgacctcattgataaaaataaataggttaatcattcgacacttttattgaaaggagagagaattatgttttttatagcatatttgcctatttttttgtacttattattagaattttatagaagttcacctgttaaagaagaaaaacaaaatagtggttctagtttttttatcggagcagttttagccttgatgataaccattccagagattatgtatttctttacaataaataaggttaattcatttctgttttttggtgttattgttgggctaattggtgtatggattagattttcttcaatgaatacattagggcgattttacagtaggaacgtcggaatgcagggagaacataagttaattcaaagcggtctgtataaatatattcgccatcctggttatttaggttcttttctgacctttttagggtttgctatatcttcatcttcgttcattgccattatcataaatatctttttattttttcttgcgtattcgtatcgtataaaagttgaagagagaacccttgttacactatttggtgaacaatataaacaatatcagtccaagacttggcgaattattccgtttctatactagaaattataggagaaagttcaaaataagttactaaagtcatttttccttattcagctaacgggtgcgttagttccaaaaaataagatgattcccttgtatttttacactcctttaaataatctaaacctatgttatttaacatctattatattagaaaattgcagttttatcttgttataaaaagcatcggtacataaaacagcgctatttggtggatcaatattaacaacagtcatatagctagagagtaaatagccatcttcataatatgtaattagtatttcttcttcagataataaggaacataacaacatgttctcaatcagttctttttcttcagcggttgagattggacggggtaccctatacgtttcttaattattttaattgtactagaaattgtgaataaaaaaagagagccgaagccctctataataactactaataaccatggtcactactctcatggtaatatgaatttgattcaccacaacaaatacatgttgtttgttggataaataatggactaagttcagcgttagctgtagtggcatttgagaaagtaatactttgaacatcctcaaataagaaagtttttctatctcctggtgttaatgtaattgtttgtggggttgtggaattaaatgttctaatagtcaatgtaacaaacgaagcaaatacagggctaaaactaaaacgaattagagttttattgtgattagttgtaaaattttcaaatagggtaattgtagaaccgggtgggatttcaagacttgtgggggtagtttcagatccaaaaattgtaaatgtctctatgaaacagttactggagtttgaagagttacatgatttatcttttttcttgtaatatttctttccatctttacagaaataatctgccatatctaatcattcctctcaaaaaagagtttaaggttgtcccatattatattatgaaggttgtataaaaaggttctagtttaaaaagagtaaaaaaaaagagagccgaagccctcattggataaattggtaatttttttgaaaaacggccttgctgccgtccgtctagcccctcataagctcgttggatgtcgttgcaaaatttgaaacttattgctaatcataaaaaagacacccaaaggtgccttcctccgacttgaaccgctttaattttaataatatgtattggaatctcatcaaaatagtattttactacgttaattaatattgatcattgagaaaaaataaaagcactctttcgagtgcctattttatttagatacagtagctttatctttacggaagatacccattaatcttccgatatcagtaacagtcattattaatgaagttttattaatgaatttaaccagcatttttatgtgaatcagcacatgtgagtggatttgattttggaaagaagaaagggacactctatattcagttagctatggaagaactcatgaatcaattgtcccctgttcaaacaatggagatttcagaggcacacattggacagtatcaaaaattaccagctcgtgttattattcatcgattaacaaaagaacaaacagagaaaaggttgaaggaacaagcaaaaaaagaaaagaagaaaggtattgcctacaaagaacgaagtaaacggttgagtgggatcaacgtgtatattacgagtctttctacagaaaatgttccaacggaacatatccatgacttgtattcattacgctggcaaattggcgtgtccagataaggacacattatctagttggtgaaagtccaatcgggagaatatgcttttaaatttaaggcaacgaaaacaacaaaatttgcagatgttgataaaaattcttggtcttacggtgcaattagtgcattagaggaaaatggggttacaattggtactggaggtaatatgtattctccaaaaatgtttgtaacacgtgaagcgtatagtcagttcttatataactctattaatgcagttgaaaaagaaacaaaaccagagccaaagccagagacaaaaccaggggtaacgccaataggtattcccaatgcgttagtgacagatgattttttctttgatagatattcaattgaaatttcatctgtaagagagcgatctatttctaaacaaggtcaaaatcttgttactgaagtaaataagaagtataatgcgaatttcagatatagatatgtagcatcagaaattgatctatatactcctaatttaccaagaatgattgactctcatggttcattttcgtttgttgggaaggatgaagataacttctatttcatgtttgtcgttgacaaatcaactgttgagctagcgaaaaactggatgcatatgataaatccgaatttcactcttgataaagagattgatagattagtaaatccaaatccagaattaaaaaaagaaattgatagttttgtaaaaaatgataaggattatatcaatcgttttgaaaaagataatcatagcgtagaattaaatgtaagtcctctacagtgggtaaaacctggggagtctgtagttactctacatccagattactatgtattaggaatttctgtacaaggaaagtaatatttaagtagtgtattgattttcgtacagtgaaggatagacaatattagggcttattgattttttgaaaaagacctactgttattgaagtgcaccccaattgttagacacataattaacaattagaggtgcattttttttatatgttttaactgtatagattttttaaacaatagatactatttcatttcttttgctttaaagatggagcactctctttttctcgtcagcgtttgaaccaacaattaaaacatcttaattcctttagcaaggcttgtaaaattccaaaagttcaacaggaatattatttttgtatgctatacatgcttttgtatcaccacgctgaatggtcttttggtcaattaacaaaagcgcagcaaacgtatttgcttctatctctaatttatcaacggaaaagaatgtattcttacgcagaaaaggtgtatttgcatgagtatgtagaaccgcgtgtcctaattcatgggcacaaacagttctctgcatagatggagataaattagtattaataacaatgaaacgatttcttttttcatatttataaaaaccatttatttcttcatgtaaatcccatgttagtacatgtatttttaagtaatctgcaagctcatagggatttttcgtgttgtatttggtgcaaagttgttggactagatctctaatgacgaatttcaatgttttccctcctaagcttgcatcagttatcgtctggattacgatatttcttaggcacgtattttttattgattacttttgtttgttttacaatgtactccatcgcatctaataatgactctaccgcttcttgactcataggttcaccagagaacattaagccatcttcgccttgtagatctttctttatttcttccattctttttgctatatctttctcatcttttggcgttacttgttcgtttggttcgcctgtaacagatcgaccaagtaaatagtcagctgaaactgaaaagcaatcagctaatttagttaaaacatcatgtggagggaacctctcttctgattcgtagtaacctatcattctttgggatacgccgattttttctgccagttgtttttgagttaaattctctttttttcgtaaggattttattctaagtcctatcacatcgttcacctctctaattgaactaattgttctctttgaattcattttagcacaaaaagttcttttatgcattgacaaagaacaattggttctttaatctgtatttagaactaattgttcttatggaggtgtgataatgggaaataaaatgtacgatccgaaaaaaaacttatataaagaaattgctagctattgcggagtaactgaacgctatattcgaatgattgatcaaaaagaaagaacgccatcaatggagacagctaggaagattgcacagttttttgataagagtgtagatgatattttttttagtaataaatcgaactttaagttctttttaaccgcactttggtttaaaaagtgtggaaagtagattttgtcatggagaagttaagagttgcaataagtaagtaaaaaaggtttgaaaatatgagaggtagataatatggggattttccgagtaaaaaaagataataattattccgttattaataataccggtctaaaggataagaggctttcttggaaggcgaaaggaatattagcttacatacttacacttccagatgattgggtgttttatagagaagaattatcgcaacatgcaaaagacggtattaatagcttaagagctggaatgcaggaattaaaagagtacggatatattagaagatttcctgttagagatgaaaaaaacaaaattgttaggtgggagacaattatttacgaaatcccagtggatgattatccaccagtggaaaacccacctgctggaaaacctgttgctggtaacctaccggtggataatcacaagctactaaatactaatatacaaagtacgaaagaactaaatactaatatacaaagtacgaaagaactaaatactaatatacaaaatataaatcatattcatgataataaacaaagtttactctcaaaaaaattaacaaatgaagattttaaaataagtcatcaatttttgatgaagaatagaatttcattaagtgaaatagcaattatagagcttggtgcattttgtgaatcactaggtagtgaactaattggggaagcagtaaatagatcaattgatgaaaatgtaccaaagtggagatatgtacgtgggattcttaaaaattgggaagcaaaaaaggtaaaaacactcaaggatgtagctatgctagatgcacagtttgatcttggtaagaataaaaaacaatttgggtcagggaataccaatcgaaatgaaatggtaccagaatggttacatgaaaaagaagatattccagaagagcagcctataaaaaataatgagttaactattgaagaagagcgtgagagattaaaaactttattaaaaaaatataaatcataattaatatttataaattttattaaattgataataaggttagattatctttggtgataaaaataaaagcagcatttaaataaagaaaagtagggggattattatatgtttgactggctcaaagattatcagaaactagaagaagaaattgcatatttagaatataacttagacaaatcaaaagcagaattaaagcgctggactagtggggacttgcaaaatatacgattaactgctgaatcggaaggggctaaagtagaagatcggattgaagctattgaatatgaattaggacataagatgaatgaagtatttgatttaaagattttaattaataagtttacaggattagatcatcaaatactcaaaatgaagtatattgatggaatgaccttagaacaaatagcgtttgacttgcattatagtacaggctatatccgacgcaaacatgctgaaataagaaagattgtcaagtttgtagatgggttttaatgttacctttttgtaggatacatgcagtgtacagaaagtattgaaaaagtgatttatagtagtaatataagatttcgacgaaagggcaactatttttatggttgctctttttgttgtgaaagaaggtgagcaacatgaagtaattttaaaaaataattttcatttaagtgttagaggtacttagtagattaagagttttatagaaaaaataataggaaaataaggagagatttagtaatgagtatattagctgcttcagttaaaacaaagaatctgccacaacaagtgttacgttggcaatcaatggtagaaagtgaatgttcagcacaaggtgtgtctgaattagttccctatgtacttgggattattatggtggagagtggaggaaactctgaaacaacacctgatattatgcagtccagtgaatcacaaggttgggcgatgaatacaattaaaaatcctaaagattcaatttattatggagtaaagcatctaaaaggagcttttgatgatgcaaagaaaaatggcattacagatttaagtgccattgttcaatcatataattttggacgagcttaccttcgctggttagcttctaacaataaacaacattcattaccggtggcagatcagtattctaaaacggttgttgcgccatcacttggtaatacaactggtgctatggtcaagtatagtcagcctattgctgttgcatataatggtggctatcgatataaaaatggagggaatttcttctactctgaaattgttaaacaatatgtagattttgatgaagctggtaataacaataaaccaatacaaccggtgggcttggggattgctgtaaataaatatccgaataacggtggtattaatctatatagccaaccacaaggtggacattttacgagagtaatttatgataaaacaccgtaccttattatagatgcagcatggtttgaaaatcctatgatttgtctcggaaacgaggcatgggctgctctggaacatttcgatgtgcaatggttcagtgcttattcaaaatatccaccaggtggcggtattaacacgtatgatggtcctaacggaaattatacaggttttgtagatgggtctgttccatatagacttttaggacgaaaagatggttatttggcgattggaaataatgcatgggtaaaagaagaacattttgatgttagataataacggggagcttttcgttcggttaatcttaagatttgaaaagctaaaatacatccaaaaaataataaatatagacagtgaacgaaggtgctcattcaagcaccttttttatattgtgtaaaaatagaaaggaagactaatatggcaaaatttatttatcctacagatacaacaagagtaacaagtggttttagaggaagtagaccagatcatcatggggtagaccttgctgaagcgggctatcatccgatttatgcagcagctagcgggcaggttagccgttcttatctttcatctagttatggtgaatgtattatgattgtgcatactattgatggagttacatgggaaactgtatacgctcatatgcgtagtggttctcgaacagtaaaagtaggcgattatgttacacaaggacaaactattggggttatggggaacacaggggagtctagtggccaacacttacattttgaattgcataaagggcgctgggatgctagtaagagtaatgctgtgaatccactagattatttggggaaaggtgacagtggcaacaatactgataaaccgatacaaccagtaggtcttggaattgctgtaaataaatatccaaataatgggggtgttaatctatatagccaaccacaaggtggacattttacgagagtaatttatgataaaacaccgtaccttattatagatgcagcatggtttgaaaatcctatgatttgtctcggaaacgaggcatgggctgctctggaacatttcgatgtgcaatggttcagtgcttattcaaaatatccaccaggtggcggtattaatacgtatgatggtcctaacggaaattatacaggttttgtagatgggtctgttccgtatagacttttaggacgaaaagatggttacctgggtattggaaataatgcatgggtaaaagaagaacattttaatgtgagatagtattttgaaatctataaatatcaaattaaatggaagaagcagtgtgatacttttttatgaattcgtttaaaacgatggtgtaggagtgtagagaggaattaaaggaagagcaactgataaacagttgctctttttcttttttagcaggtgaagacaaggaatttattagagaaaatgctggccgtatggagattaggttactagatgtactaaataatgcagtgagaattttaagtaataaaaacgagagaataaaaaggagatgttcagtaatggagattagaaaaaaattagtggattcaagtaaatatgctataaaatgtcccaatgcaatgaagccagaattcatcacagtacataatacgtacaatgatgcatcagctgaaaatgaaatttcttatatgattggaaataataatgcagtttcgttccatgttgcagtagatgacaaagaagcagtacaaggtattccgtttgatcgtaatgcttggcatgctggtgatggtaacggaaatggtaatcgtaaatccatcggagtggaaatttgctattctttaagcggtggggatagatattataaggcggaagataatgcagcaattgttatagctcagttaatgaaacaattcaacattccaattagtaatgtacgtacacataaatcgtggagtgggaaacattgtccacaccgtatgcttgacgagggaagattggatcaattcattgagaaggtaaataaagcatttaacaacaataataataaaccaatacagccagtaggtctggggattgctgtaaataaatatccgaataatggagggattaatctatatagccaaccgcaaggaggatattttacgagggtgatttatgataaaacaccgtatcttattatagatgcagcgtggtatgaaaatcctatgatttgtctcggaaacgaggcatgggctgctctggaacatttcgatgtgcaatggttcagtgcttattcaaaatatccaccaggtggcggtattaacacgtatgatggtcctaacggaaattatacaggttttgtagatgggtctgttccatatagacttttaggacgaaaagatggttatttggcgattggaaataatgcatgggtaaaagaagaacattttgatgtgagataaggttaaagaattagagtcactcgtatgagtggctatttaatttttggattggagtatgattggaaatagaaaatgtcagtagtgttctatactaagttgtttttatgtatcgattcaagaataaaaggagtagtttagtgcgtaatttgtttatgttgaattaaataagaagtaggaaagaggtggtaaaatggatagtttacaagaggtgaagggtgatgttcaggaaataaggcaagatattaaggaaatacgattagagattagaagtttagaaatgcggacgacaggtaatgaaaaggacattattaatattaataagcaattagacaaaatcagtgctaatacaacttggatcctacgccttattattggtggactaattggagctgctcttaccttctttttgaaagaccaactatgagaagtcaaggggagttttttatataaatagggggtgttttatacaacgatagaggcattaatatcgctacaataatcgaaaaaaagtcttgataatatggtgaaattcactccgtttgcagcaattcctgaacagtttgctgggatacgtgaaatcatcaaggagaaaaataaagtaactcggccgatcttaacagatgaagaaaaagaactaattgagaacatgttattatgttccttattatctgaagaagaaatactcattacatattatgaggatggttatttgctctctagctatatgactgttgttgatattgatccaccaaatagtgctgttatatgtaccgatgctttttataacgagatgaaactgcaattttataatataatagatgcaaaatagaatatatttacttaagcacatttagaccattataaaggagtgtaaataatgcaagaggctcaaataagaaaaagtgcagcaggagcaattattcataacgatataaatgactatccctatttaaatataccgatgattattaatgaaaaagatggaatgatttatgaagttctaggtgctggttttcacactaatgatgctgtagcaataataacaacggatgattttgctacaaccagggtaactgcgcctcttataacagtaaaaaacaatgatggtagtattcaattatatcgcttacctttagaactagaacattgggtactttcttgtatgcgtgctgcttcagtaggaaaaaatccgtttccctgtaaagttgctttcggaatcatcgatactaaattttatgtagaatttatataaaaaaggtctgcttattcagcagacctaccatcaattatagctttatatttttttccttttcaatgtccaaataggtgtagaagcaaggatctggattggctcaggtaataacggtcttactttcttcccatctcgttgtcgagaaaactttgtgcttaaacgtgctttatcccaacctagtatctcagcaaattcttttaaaccaacgagaaggggaattactcccccagttcatcgctccacacttgataaaagccgccaccaaccgtttcaagtacattatcatcctcttgtggggatattccataccaatatgaggttgttatgacttcgccatctaaagtttcaattgtgattttttcttgcgtgtaagctataccttcttcagcaacttttttcgcttcacttaaatcatttacttcaacttcttctgttacaccagtatgatagtttacaatgtatttttccatttataatatccccttcaaaagtgataactttgttaacactttttaggataattcatttaattatttccttccttttaggaaagagaaaatccatagcttctacagttaaaatccattctccacgttgttttccttcaggcttgtagtatttaacttttccactctcaatcaatgcatctattaatttattatcttttcctcgcttcaatttcattagcagcgcttcttgtataatcccccaacgatcacacgcctctcttggtggcataatttcatctagcataaataacatccccatcacctctcgttacctataagtaacgttcaaccggataaaaaaacatgatgaattctacatgcgtgtgattggaaccataactttgcccaaacggcaaggttatggttctttttgtttgtggcaaagttatggttccaaaaataaaatgtacaatcaacttaataacaagttgccccaaaaacgataaaaatgaactccattgttataaaggaatctaattttttgttttgggggtagtatagaatattaacttgattgtgatgtggcgctaagcttataagggatcactatatttaaaaaaattgtacgtttagacacggtttggcaaaaaactaactgttttcttgtacattaataaaaactacagtaaaagttgtagtttttatgttttcattttcctttttgcattcatcttttacttagatgaatgctttttttagtacataataaaaaaaaacggaaaaagtgtcacaaaatccgtttttctggtttctatataatacaggcatcaaattgagagtgaggttttaactaacatgttaacaatagaaaatgaagaaagtcatgcttctgacatgacttttgaagatttatttaagcagtactatgcttacgctgtgaaacaaatcatatggattgttaaagatcaatctatcgctgaagagttagcgcaagaagtatttttacaattatatcgtagcgattggaaagcaatcgaaaacatacctggatggctgattaaatcttctacttatgtagcgtataaccatttgcgatctgaaaaaaggcatcaagcgaagattgataaggaaatacaataccatgacgtacaaaatgtctcatcattagacgatgattggataagaaaagaagaaattacaaaagtccaaacgatactaaataaaatgaatgagcgagaacgaacccttttactaatgaaattctctggttttcaatataaagaagttgcagaaatacttcaaattgaaatatcttctattggaactttattagtccgagccaaaatgaaatttcgcaagatttataaacaaatggaggaggcataacaaatgaaatgttatgatatcggatttattcaaacatatattgatggagaactttctcatgatacaagaaaagaatttacaaagcacctagatacatgtgaagcatgccaagatttattagtagaaatcagtaaattaaaccaatgggagaatgtaatgctatatgaagaatctgcacattcaccacaagaaatcaaaattgacgtagaacaagcatggaaaacatttgaaagtcgttcaaaactagacaatgtttctaatataaatcataaaaaacaacaaaagaagggaatttttacaaacatgaataaaaaaacaaaacgtttcatttatacagcagtagctgcagcaggactatttacaacagcaatgattccacaagtacaagtggcggctacaaatgttgcctcgtatttttctgatgcaattacaaatgataaggttgtaaatgaaggaatacaagacgaaaatggtgtcacacaagatacgatgaagaatggcaaatatattcctattgatgaaaaaattacagatcagggtattacagtacatttcaaagaattatatatcgcggattcacgtatatcagttcattatagaatggaaaaagcagatggaagtttagtaccatatgaatttgatacagctggagtagatcttaagagtgatggtaaggtcaatggacaacaagaggaacgacctgaacttaaaaatggatcattaatatcctttatacaagataaagatgattatcttcctttcgaacttatggcaacaggtaaaaaattagaaacaggcattcgtgataaagataaaccagaaggcgttgttacatttgttgtaaatcctgaagaaaaagacgcttttaaacaaccccttacattagatgtaaatataaataaaattggaaaagtagctggatcttggaaaggtaagattcaaattgatacttcacatttaaagaataaaaccaattaacatgaaaaaaagaatagcacaatatgtatctaatgctcggtttatatgttttcttgtttttgttacatttatttcttatatagttttcactctatcttttatttatgatttaagtttataaacttaaattaatcatttaaaacattataagataaaaacttcataaaaaagctgtaaaatcaatagccggttccttaatgtataaggaaccggttagtttgtgtctaaacgtacaatttttttgatatggtgacccctactaggggtagcgtcaggaaaatgcggatttacaacgttaaggaaattcccttattaaaaagcctaatttctcaacatttatattgagaaattaggcttttttcgttgctccgttaaagcgccctattttggaagatcaagataataattactgccaatagataattgaactaatgctcccgattatggagcaaatcactatcaaatccttcctttttgttcattatatatactccaaataaaatgatgatcatggcactccaatcacttatcaaaatgatttcgtttgctaatagtgcgccgattaataaggatattacaggtggtatataagttactgtggaggctattattgcccctaaattattgacgagaacataataaagaatgtaagctagccctgttcctagaactcctagtcccactaatacaccaatcaacgcaactgagtctgattgaatattctctatactttgtaaatccccaaagagaccaagtataatgattgcaatggccacctggtaactcgttaaagctgcgggagaaatattgatttttgttaaatatttttttgcatatacaaaagaggcaccaacactgagagaccctattaacatatatatgacacctttaacgtcaagagctgtatctccgtttttccatggtctcgcaataagtaacacaccaattaatcctacaataactccgactactcttttaacagttaccttttcttcttttaaaacaaagaaggtcatgattgtagaaaaaatcggtatggacccacttaaagccccagctattccagaattcaacaatgctgtgcctttcgcaaaacaataatagtaaatgatagttgcgaggatagacataattagaaagtggtgtatatattttatatgacttaactttatttgacgtttaataagtgcataaagaaatacaggaataaaaccggctaaaactcttagaaacacaatttgtaaaggatcaatatgaacggcggcccatttcataaaaagaaaattagtgccccaaataaccccgagtgttagataagctatataataaacgttgaatttcatttgtgtctttagcactttttactcccctttcacacttcccttttttcttctttttttgtataagaggaagacgataagaagtttaatgtttcatgtaattgatcagctgcataaaaagcttcctggtctttggatatatctccaggtttatttcctttcccaataatatatccttcaaaaggtagaccaacaaagtcaaagatgtagttgaattgctgaattaatggtaatccttttataaaaggagaatctcccccaactgcaactacataggcctttttcttagacatgatttttcgaaagtctttatattgaggatctctcatcgtttgggaccatcgatcaataaagttcttcattgttcctgtcatactgtaccaataaatcggtgtcgaaaatatgagaatatcgtggtgcaccattcgatatattagggagttataatcatcaccaacatcttgaaagccgtcttcagtgtggcgcatatcatctattggtttaatattgtaatcccttaagtaaatggaatctacttcgagatccttaatagaacgtttagttaacgtctctgtatttccatttgggcgagtacctccgtaaataactgcaatactcataattattccactccttttttttgactgtttatgatttatagcttaaactacacatataaatcagtaaaacagattattccgtttggttcaatcgatatttccgatttaggagggagacgaatatggatattaaacaactcatcacttttaagacggctaccgaaactcttaatttcaccaaaacagctagtatattaaactttgctcaatctagtgtgacagcccaaattaaagcattagaagaagagctagaaaaacctttatttgaacgcttaggtaaacgcctaacattaaccgaggcaggaaaagaatttaaaatctatgcggaaaaaatcattaaactaaatgaagaagcaaaaatggccatcagtggaaataaagaaccttctggcacccttatcatcggagcacaagaaagtcaatgtacttataggttacctaccatattaaaagaatttaaagatcgataccctaatgtaaagttaatatttaaaccagctcattccgacgagttagctagaaagcaactaatgaatggtatgcttgatattgccttcattatggatataacgaaacctgaagaagctttaacgataaaacctttgatacaagaagatatcaagatggtggctgctccaaaccatccattagcttcgaagtcagaggtttatcttaaagatattgagcatgaaacactgctattaaccgaaagtggttgctcctaccgtactcttttagaaaagtcttgtcactcagcaaaagtctacccagtaaataagtttgaatttggtagtatcgaagccataaagcaatgtgtgattgcaggattaggaattgctgcattacctacaatggttgttgaaaaagatattaaaatggggagaatggtggaattaaaatgggataataatattcctcctattttcacccatatcgcttggcataaggataaatggatgactcctccattggaagattttattgaattaactcaaagaactttcaacagacacaagatttaaacataaaaaatcgctaagagtttgttaaacctagcaattttttcatgttaaccagaataatcacttactggaaaaaagaagcatcaaaaataataaaactctaaggctatcccttgccttagagttttattctatcttattcaattatcgggtgcttagtttaaatacactttttacaaactctatctaattttatcataaacttccttaatcattccttactccattatatggcccttaatggaataaggaacgattattgtttctcttccgacagctttctatatatggggaaattaggtcttagctacagccttacgcgaaatgggaagaatagaaaaaacgatctttattcttaattacatatcggatgaaactttaagaagaaaaatacaaagaggattgaataaaggagaagcgatgaatggactggcaagagctattttcttcggaaaacaaggagagcttagggaacgaaccatacagcatcaattgcaaagagccagtgctttaaacataattatcaatgctatcagtatctggaataccctacatctaacaaaagcagttgaatatcaaaaagagacaggtagttttaatgaagacttattgcaccatatgtcacctttaggctgggaacatattaatttactaggagaatatcattttaattcggagaaagtgatctcattagattctttaagaccactacaactttcttaacgttgttaaaaatgggggaatcgtcttggaaaagagcttagcgttgtaaatccgcattttcctgatactaccccatgcccatcaacttaagaatttgcactacccccaagtgtcaaaaaacgttattcgtgaaggcgataacattattacgatagaaaaaattaataatggtcttccttatattactaatattgatgcttttcaacgatggaatgaaaaaggtaaacataaatttggtttttatagtccagaaactgacaatgaaaacatgtctcctgaccgtttgaaaactttaatggaaatagaaatgaagaaacgtgtaaatgcgtctgtttcttatgaggtaaaagcggcatccataggacgtgtatttggattagcacatgaattgattaatgagggtgacacaatccgaattaaagatacaggatttacaccaaaactttatttagaagcaagagcaatagctggagacgaatcttttactgatcctacacaagatcaatatgtatttggagattatcgagaaattgtagatcctaacgaagaattacgaaagatttacaatcaaattcttagttcgttaggtagtaaacaagaaatgctagatcagctagacaaactggtgaaagagaatgaaaaaacaattgaaaccatacgaaaagaatctcaagcagctaaagagttagcagaaaaagttcaagaaaatctaaaaaataatacggtaaatattattgaagctaaaaacccaccaattgataatcttatagtaggtaaaacattatggcgagatattagtaacggtaaacctggtatgttaaaagtgtggaatggtaaagggtgggagcttcttattcctgatgtggaatcaattaaaaaagatacactggagcaggttaataaggatattaaacttacaaaagaagaattaaataagaaagtggaagaagcgcaagaagaagccactgggcaatttaatcaagtaacagaaagccttcaaaaagttacgagaactatttctgatgtacaaagagatcaaggtgaaattgataaaaaagtaaccaagtttgaacaggattctgagggatttaaaacttctattgaaacattaacgaaaaatagtactgatactacaagtaaaatcaacaccttagtaaatgatgtggacggaaataagagagttatttctgaagttaaagaaagtgtagcaaacattaatgacgatgtaagaaacttgttaatcggttccaaatcttttgatggtgctttgacctctgcgcaagcggacaatcgttggtggcttaagtcagcagataaagtcaaaatttcgaaggatgtttttcaagggaatacagtcgtagaaactcaatcatcatggaccgctttagcttataacttcaaagatttagtagatcgaaaagttgtaaaagtaggagataaagtaacctattcaatttttactcgtgtaaaaggtttaccgaacggccaagacttacaacacactttctattttgcagcaggggctaccggcatccgtccaaataaatctactaatcaatggcaaagtgtaagtgtttcgttcgtagtgacagcgggcatgatggcatcaacaggaacggataacgagagtcattttcgtgtagaacctgacgtgaatcctcctgctggttgttggtatcagcaaagttcaccacaattgactataggtagcaaaggatattcttggcggccagctcctgaagatcttgcagatgggaatgttttaaccaaggtaacaacagagatcaaagaagcagcagggaagattagtgaaaagttaacaagagtagaaacaaaggttaataatgataaatctggaggacgtaatctgttattagattcaaatgctaaatacgaaaaaacagattatctaatcaatccatattctctaactgaaaattttgttgcaggtgaggaatatacttttgtaattaaaggaagtgtcccgcagggtcaacaatttggaatttggcagaatggtggttcaaataatgttggatatgcaacaagtgtctatgctaacggaataacttatgtaactttcaaagctgttgcaactacaagtgggaatgaacggagattaaacttatataattatccaaataatgctacaaaggcaactgtagaatgggtggctttatataaagggaataagccacaggattggacaccagctccagaaaatcaagtaacgaatgatgaattcactaagaaaacaacagagattgaaaaaagtgtggatggtattaaagaaagtattaaaacggtagaaaaaacacaaaccttttttgatgaacgtgttaacactgtagaaaagaatgcagaaggaacaactgcaagtgttaagaaattacaggaaacacaaactgcgcaaggaaagacgattagtgaggctactacaacaataggtcaacattctgacgcattaaagttaacaatgaaaaagaaagatgttgaggattatgttggtggattgggttctataaatgatctacggaacgctgcattcgctcagggcttcaaatactggacacaaaatggtaatagtgctgttattgactcttctgtaacatacagaggctatacaacggctaaattacatgcgactggattgactgaagataaatggtatagccttcatcaaacgatagacgtaactgctggtgaagacattgtagcttcgggttactttatgtccaataacataggacaaggtttcgtgttagaaattgagtatctaaatgcccaaggtagccgagtttcacaatcatcaatcggtatcaatgtaactgcgaattctaattggattagatctgttattgccggaacagttccagttggggctgttaaagcgcgttataaaccttggttgagaaggaatggaacgttatggattgcgttacctatgttgcagcgtggtaaaatagctacagaattttggctacatcccaaagatcaaacggatattgataaaatgatagatgatattgctaataaagtagctactgagaaatacaatcagaaagttacagagttagaaagaagtattagtgctactgaaaaaggcgtttcaattatctctggaaaacaagaaacgtttataaatgagacttataatgcctatgtaaagaaaacagaatctaagttagaagtgttagatgaggggattttagcgcagattttaaaagacggtatcattacttctattaatatgtcacctggtaagattacaatcgatgcggagaaactgaatattaatgccgatacaatggtgaaatggttaactgcaaaaggcattgatacgaatcttattagaattgatggtgataagataaccattgataaagatggtgtaactgttaaaatgctagacttcctattccaagacgaatggggcacaaaaacaactgcagtatcaagacgaaacctaatagcagatcccgacttttctagtgttacaaagaaaaacattggacataacgattattatggatttgaaggtggatatggccttacttggaagtcctggggaaatgtcgtaatagaaaagaatacacatatattcgattacgagcagatggtgaatgctgcaagggtagatatgtataactatccggaagcgatcgtgaataacggtatacatcctggtaacgaatatacagcatccgctcattttagaactgccatgataaatggcgtgcgtaagacaggaaaaccgagaatacacgtatgctgcgttaaattcggagataacgtaagttacgacatattgagtgaacaaaagatggacttccctgagccatctacctattatggagaaatcagaaggtattcttttactttcaaagtgccaacaaactatattccgcaacaacacgcattgattattaaagtttgttctggaaatgctgacatgagacaagggacagcgatttgtgtaagtggtgtaacactgtacagtgggaaatatgcatctatgtataattgggatcgtgctgcagcagaaagagcagatggcattcagccgtttaacggactcgctgtaggcggtgtaaataacaatatatctccagcaccagacggacagacgtttgatataagtactgaaaaagaagttaaaatctttaggaatatacgagcaatgcagggaattaacttaggtggcggtggattccaacaatggggtcatattcgttttacagacggtaatatgggagcgggtttttatgcgagtactccaagcggttggaaatttaatgcacttggatagaaaggagcgataagaatgaatgagaatcaaatgatgccacttcaagcaggtgaaagctttccttttatggggaggttggtggatgcagagcgcacagatacagggatttttgttcaaatacctgccgatatgttaaataatgcaggtcttctaaacggtgttagcagggttgaagtatggagagaaatggatgggacagtaaagtttcggattgctacgctgtgtgaaatatgtaaacgcggagcgcgtttgtactcactagatatgggatttgcgaaaaagaacatttgtttagagtgttatgcatcacttacagggaattacccatctcaagaaccgccaacaccaactaatgaaaataacacacaaacagagcaggagcagcaatagctggtctttttttattgctaaaaaaggagatgaaaagatggatcgtattgatgtattattaaaaacctttattgccactttcggtggcttttgcgggtatttcttgggaggatgggatacaacattgaaaatcttagtgacgatggcagttattgattatttaactggcatgattgcagcaggatataacggagaattaaaaagtaaagtgggtttcaaaggcatcgccaaaaaggtggtgctttttcttttggtaggagcggcagctcaattagattcggcactaggaagcaatagcgctattcgtgaagcgacgatctttttctttattggaaatgagttgctttcacttttagaaaatgcagggcgtatgggaatacctttgccttcagctttaacaaatgcagtcgaaattttaggtggtaaacaaaaacaagaagagaaaaagggagatgttcaataatggaaattagaaaaaaactagttgacccaagtaaatatggtataaagtgtccttacacaatgaatccggaattcattacagtccacaatacttacaacgatgctacagcagaaaatgaagtatcgtatatgattcgtaatggcaaccaagtgtcgtttcatattgcggtagatgataaagaagcagtacaaggaatccctttagagcgtaacgcctggcatactggcgacggtaacgggaatggtaatcgtaaatctattggggttgaaatttgctactctttaagtggtggagatagatattataaagcggaagacaatgcagccatcgttgtagctcaactaatgaaacagtacgatattccaattcataaagttcgtacacaccaatcatggagtgggaagtactgtcctcatcgtatgttggcagaaggacgttgggatagctttatcgagagagtccaaaatgcatacaatggagatggtaaagtaactcctacgcttattccaccgtcaactaacgggacaggtattgcgtatattgaggggaatggcataaaccttcgtaaaggtccaggtactggatacggggttattcgtcaattaggtaaaggtgagtcctacgaagtatggggacaatccaatggatggctaaaccttggtggcgatcagtggatttataatgattcatcatacattcattatactggagaaagcacaccgacaagttcgcaatcagtcaataatggtgtaggaatagttactattacagcggatgtattgcgtgttcgtagaggtccaggaactaattatggcattgtaaaaaatgtgtaccaaggagaacagtatcagtcgtggggatatagagatggttggtataatgtgggtggagaccaatgggtttcaggtgaatatgtgaagtttgaagactaaagtaagagccgtcataatgacggcttttttatttctacgtaattaaaatttacttttagataatgcttttaagatcggatttataattctacttattaaacgaaaccccttaaaaatagagctaacaactttcataaaattagaatctctttttattttaaacacctactttcgcaattctgcttgtagaataaagttttcttttatactacctttatatgtataccttattttattcttttgataaacctttgtatgatctttgctaaatactgtttcgtcactaagaccaagttcttgtttaactaaattacgttctccaaaactcagtgaatcatccatcgttcctattaataataagaaagcgaatttaaagtcttccatctcagtaaaataagcatttggagtcattgctaatgaagctttttttatatttttattattatcagtttctaaaacaataataatattgtctgataaaccaatagacgttctcccgtcttttaaaatttcagttgagttaatttttagctttgttttttctcccatctcttttaatgctttttctactctttttgtgtagtcatctactgttaatttagcctctttattttctgcaaccgcaggtttagtgccatcctttttattaccactaacaccagcagcaacaaaaattattattagtgcagcaataatccaaacccaccattttttataaaacggttttttcatatagtttccctccatagatttatacctaaatcataccaatttcatacaacaactgtaaatgttagtttgtaatttattgacgaaaaagaacgttcgttctataatttatgcaaacgaatgttcttttggaggtcatcttatgaatcatttacttaaatgctcgttcaatcaaaaactaccaattgaattaatttatttaaacggttcaggagatttctctcaaagaactgtgattgttagaaagatatatgaagatcgtgtattagtgtattgcatgcaaaaaaaacaagttagaatgctgaaattagctaatatactttctgttgataaagttagaaataactatcaatatgcttaaaaataaataatgaggtgagatcatatgtcaacagcaattccaaaaccaccaaagaaaaaggctactaaaaaagaacctagaccatacatggatgaattcgaacaacaagaggctgctgaattaattcaattggcagtgcaagatgatacagaattagtatttactgtgtatcgaaaatataaagaaccagatgttatccaaggtaaaataattaaactggaacaacaactgaatagaattgtagtgagtgatggaccaaatgcaatacataaaattcaattcatggatattttgaaaatcgaaacgcctagttaatttagctaggtgtttttgaaatatctatgaattaaatatgcgagcaaagttttttcgttttcagttcgtcatagaggtactatataaactccctaatttcggaatacagaattacagagaaaacggaaaacaaaaatttcaaaaatcgaaaaatcaagatttcaaatttaaaaatttttaaataaaatcccacaccaaaaatccaaaatcaaccccaaaaatgtagaatttctattttcaaaaaacatcaaaaaacgtgcggtattttatcgatatagatatatctaaaaaaattcatgcgcacactataggtttttaactcgtacagtagtaaaacgaaatcatcagaacaaaatatatctcgaaataaactttaaaaataaattcacaaattcacaaatttaaatttaagaaaaaactcttttttgttaattctctgttagatcataaaaaccttttgaatgctacttgctgcactcagaaggttttctttcaatacaaaaaagagagaaccaaacttaatattaagactggttctctctttgtcattcaaatatcatcaaccgcaccacatttttcacatttaacctagcacttatatgagtaatatacatcttcaccatctttgaccttactttttgaaatccgataaattttcatttcttcgttataacattcccaacaggtatgtttaacaatatcaccttttttatacaaaactattcaacctccatttcatcaatcaaatgaccgttatattcttgtttctcactttccgttaactcttgatattcttgttcaaatttcattaaatccttattccacattgcaattaatctataataatactcatttttatctgtactcttatacttgtccaattcgccatcttcgtattttttagcataatcttttagcaatccaccgtacacaattaattgtcgaccttttaaagctaaataaaacacgtcgaacacatcttgactcactgacatttcataatcttttgctgaatacttcgcaacctctgcaactgcatttccttctcgaattaactctactttttgaatatgtacttgcgtaatctctggcatatctgttacttctcgccacatttctaaccattcttcttgcttaatataaagctctttacgtttaaaataatttttatcaacacaaagcaatacatgaaaatgaggattatatgtatcataattcgggttatgatcgtctactttcaatccacgagaatcataatatgcttttctctttttgttgttatacatttcttcagtgatgaatcgttctttatcatacgtcatttctagctttctaatataacccttaatagaacgttgaatattacgtctcttaaataatttattaaaagctttattaaatctatcaatctcgctttttaccgtatcagctttaatattcggagttgtcaatgttaagaaaagaaactctttcttttcttcaatcttgattgcttccatcattgttgcgattttcaccgcgtccttccctgcttttctccaagcacaaatcggacaaaatcgatttttacaatcattaccctttactcgtttctttttctttttatctttcgtagccacaaactcattaaaagtactgcacgatttaaacaattctctcccgctctcactcattttcttctctataaattcataaattcttatattctgtttctttttaggttgtaatttaccagtgatttcatcttgatttttctttgtcatgtttgatatattagtcctatatgaattgcttaaaaaagggtacacgaatccctttttcggacttgctccttccttggtagttattgtttttaattcgacactaaaaatgataaatctacccgccggaaatagcaagtcttttttttcgaaatcccttgtgtatcaagggataaaagaatacataggcatcaatttccgtgcggaaatagttacctatgtattaaagaaagaagaaaaccgtatttttcgtgtccgaaaaaccataaaaaaatgcccttcaatccacttcgtggacaagggcattttttcttttaaaaacaaaaattattcctatctctcagcctcttcattttcacttctaagcgtttttcaaacaacttataatattttctctttaagaattacacatcaatcccctatacctcaaaaacatatatttcagaacacgttcgaagtgttgccatgaaaaaatcgagaaattctcgaactttacctgctaattagaataacaggtaactccctttacactttctttgtctaaataaaacaaattcaagcaaggctctacaatcttccctatcttttgcaatgaaatataaatttgtttacatatttctaaaaatgagtataattgtattgacggttaatacgttataactgttataacattctaactaaacgtcataataatacagaaagactaaacacaacaaacaaaagagaaaactaagaagaccgaaaaaaccaaaagcaaacaaacaaaacaaacataaaatcacactatataattcgaaaaactcaatacaaacacaaagtggcaattagactacgacaaaaaatagtgtggcaaattccaaggaggaagtccaaatgacagcaaacactcgccacatggaaacacaaaaaatcgaacgtaaagttactaaaatcggcaattctttaggtttaacattaccgcaagaattttacactactctaaatatcaaacaaggtgacgttgtaagtttagaaattaacgaagaaaacgaacaaatcgttataaaaaaatccaaaaaaatttctatgccagaggatctcaatcctaagttcttggaatcgttaaacagaaccatcaataaatttgacggtgcatttaaagatttggtaaacagataattatccttcaggcgtggaggaaagtaggaaaaccgaaatgacaatttatataacagaaactcaagctatttttatcaatgaaacacttatcgacatgtattcacctaatgaacaaagaggtgttaaagatacagggttattacaatcagcaatataccgtccacaacaaacagtagcacaagaggatgcatatccgactatcttccacaaagccactgcattatttgaatcattggctaaaaaccacgcattctataatgcaaacaaaagaacggcattagcttgcctagaaatgtttctgttatacaatgagtacgaattaaaaatgtccgaacaagaatcttcagatttcactgttaatgtagtagaacagagattatcttttgaagaaatcttaaaaattataaaagaaaactcatcaaaattacctttaaattagaaaaagacgtgggatttaaccacgtcttttttattaaacaaactatcttcaaggatgttatacaaggctctacaatcctcgctatattatgcaaaacaagttccgctaacgctacacatctaaagaaaaaagagactcacacagagcctcctaacatgccattattctttatcttccaaagatactaatacaacattttcattcatatcacgcaaacgttcacttatagctctcagacctccactaagtcccataatttgatcattcatttccttgataagttctccaattccagctaattgttcatccttacgatcataatcatcaattttcatcgtcaattccaaaatcctacatgtctcttcaatcgttaaattatttttcttagccaattcctttacagtacctataaacttaactccataactatgaaaatattccatccttggttgttgattaaataatgttcccacactatctctccaatccctggtcccaatttttctgttggcttcttcgtacttgttttaatctcttttgttgttcttcatgctcttgtttgtgattcaagaacttttgagcaccctttacttcatcatcaccagcaaaatgtcgttttaaaaacttgcgattcatcttgtccagtatactccccttaacataaccaatcacccctgcgagttcaggaagcttctccttatacatctctttcactcgctccaacgttttcttaagaaaatcatttgcttccttcaaccctcgattctctcttttcaagtctgttacttgcctttctaaaaaacgttgccccttatataaatcatctttttcacgttcaatcttaatcttttcatttttaaggcgtctattttcgtttctaagagactcagaagacttagctaatgattttatactatcgaagtcttctgaagcaatctcgaccattttagagcgtatgaacccgcctttttctttgactggaatctcatctacacttttcgcttgatctaaagacgatgctaaatcataaagacgactatctatttctttcttttcctgctctaacttctctatttcttgttgcaaactcaccgctttaaaccgctgcgtcgataaatgtttcctgtcgctagaaacaccacgctctatatcaaatcccttttccttcacatgttcatagattttatcttgtagatcatgaagctctgatttgtttttaaaaaatgaatacgctgatagtttttgtttttcattaaccggaaccatgcccacatgcatatgaggtgttttttcatcaacatgtactgaagcatatacaaagttctcttctccatatctcgcctttaaaaaacaaacagactcttcaaagaatcgtctctgttccgcttgagataaagaattcatataatcaggactagccgaaatcataaacgaacaacaaacaacagcatctttccgaatcgcacgattagatacaacaccattatcaattcgattttgaatgaatttcttataatccacttttcttttatcatgaataagatcataattctgttccgttcgttcttgaataatgtctgaatttgaatgactttctttttcacgctgattatgtatttgtaatcctttcacatctgtcatcttgaatttttgcatatgacaaaccatgaattttgacatgggcatcgctccttcttcggtcgtagttccatgtaaactgtagcacactacagtttactgcgtaaacacgtgtgccctacgggacatttcggcgaccgccgagccatgacaggcatggcaaaagaattatgggctttgcccaaacccacaagggaaactcttccccttgacccctttcaatcgaactccccaacccctcaatccttgagggactccctcgccggtaggcatccccaaaacatggttttgggaagaacaagagggtcttggtcgaagttacctatcaactccttaatgctccatcatttcgctatcgcttcattccgtccgcttaccgttgacaggtaccataaatactcctcccccttttaaaatctgacatccatatattaaaaagtctctttttatattcaccgccccaccgatctatgggaattttcttgtagtgaaataactacttcctctacaaacatatttttttgttttacaggaagagcttcagctttttctattctttcaaacaccccaaaaacattaatacaatcacattttctattagaatcactataagaatagccatagggtaaaactacagatattcgtatattcattcctagacccattcaaataaaaaagagcataaggaaaccgaatcccactttgtacaaaaagtggtgaaatagactgtgcctattgggtttctcatgctctacttcagggaagcgattttccctaaagtatgcgtcctctatacgtttaaaaacgtttagtatgtattctgcatgtgctttgcatacaccatgacaaataaaaaaagagccccacaaataggaactcttttttcattactcatcaattccaccatttcattttactgcattacgataatcacacataaagttaaacaaaatcacgaaatatctgcctacctctcatcttccaagatgttgacgcacctagcaagcctataatttcatttaccatattcatgtgataacaaacagaaaaagaaagaaaaagacagtcataaaagtttgccgaaatttaaaataagcatataaccctaccaaaaaccatatgcgaatataacctgttttccactagcaaatattaataccgatttcatcatacacaagctatctaaagatagaatagcccctaaattattttgtctcactatcgtctggaatatattcaattaaatccgatagtttaacatttaacttttcacagatcggtagcaatgtatctattcgtaaagatgacacattgtcgttacgccacaacttattgatagagttacgacttacccctgtcatcctaaccaactctgcaacattatctatattctttaccgccataatcacacggaagttatttactactttcattttttatactcctttttctcatgaaatatacatgcttttttcttataagggcacttttgtgcaaagaatagttgttttttaaccttttaaacacaactttagcactttataaaacatttttaaacctgtatggaataaaaaatcatattatgcactatttcatacttcatttaaattaaagttaatttatatacatataaggttatttattttatttatttaaactaatttaaaacctatttaaattaaaacgttcaaaatatgcattatttcatactttatttgttgaaaaattaacctgataaagttaatattaatcaaagtaatatagatttttaatgattggaggtcatttctttggcatatataatatcaaaaaaagtaaaaggaaacatttacttttatgtagcccaatacgttggaacacaaccatattactcaaagcaatacaaatataaatgcatttacgcaatcggcaatcaaaaaatagctttagaaagaatcgcaatgtggctattagataacaaccgtataccaaaagaactactagaaatcggagtatccataaacgatgtgaaatattggtatgaaaaagttgaaaaaacattacagaactactctttaactaaccataaaaacacctgaaaggagcattactatggcatttctaacaaattacaaagcaaacggaaaaagatacttttatgtagaaaaatatgttgtatacgtcatgtgcatattttataccttccaattacccatatgtttaattgtgtgtaactgaccccttcgccaaaacccttggtatcattgatttcatttcactttctcttttgagttacacattacgaaatttatgagtaactgtatagatgtaaaaagaaaaaagcaatgattagattttaaacctagtcattgctttatccattgcatcttggtttacacctatataacgtaacgtgaccttctctgacgaatgattgaatatctccataagtaatgctatgtttttcgtttgcatgtacatgtgatacccgtacgtctttcttagcgtatgtgttcctatttcatctaatccgaactctgctgccgctccacttagtatcttatatgccatactacgaccgattggccgattttttccctgcctactttttaataggtactcatcatcttctctattttcattaaaccatcgaagctctctctttagtgctgctgttatttgtatgcgtttctgcttacctgtcttcatttctcgcattgagatatgactaccttttaaatctccaacctttagttttaaaatatcactgatacgtaaccctgtattgattcccattacaaataaaatatagttacgtgcattcttttcttttaaatattctttgatttgttgtatttgctctgaatcacgtatgggctggacaaaattcatgattcattccctccagtttcttcagtttcataaacttctagtctaagagcaaaggccagtttataaaacgctctagctttcacacgtcgatacgtacgttcactcatgccaatttcgttatataccatataatcgcatacatcttcgtcttctaaatatcgtttaactataatgtccctctggttttttccaactgtattgtttccgaatcgacttaatgcttgttcaactcgaaatgccattttctctaaacattcttcacgcttgctttgttgaatattagagattgctacatcttctaacggtttgccaactgcatgtgtaggaccatgctctttcctttcataagaaggagtgactttcatttccttacgtatcattccaaattgcttatatatacgtacactttccaacatcccctccaattgctcttgcgttgctgctctatcgatttttggtaagaaagataattgcttagtcattccagaccactcctttttatttttaaattacttttctcttattgctccatatcttcgttcataacaaggcctatgcccctccattaaatcctcaatttgacgagtgcttaacttctcttttcgttttttcttagttttcttttttgtttgattgcttttccattcacgtaattgatctctcaacaccttcatctccccatctcccttctcaaaataaaaggacacctattcctaaaacagcttgaattgctgctttaatgaattggtgtcctctagttttctagccggactttattccattcttctactcaaaacttatatgataaccttatgactttcccttcaattgattataaattatgctttagcctcctctttttcttcattttcctcttcttgtattactttcaatgtacttaacatcaatttgtaaaatgtataattatttgtataatctatttctttataactttgcttcatttgatttactataaaagaatctttatgatacttttcgatatacaaaatactttttgacacccaaactccaaaattaactgaatcaaaatataatctcccctcagattgctttacttcagattctaatgcttcccctaattttatcaaatgatatagcatatactgtctccctccttctagttcatgtatcaattcgacagtaaatttgtgcatcctaccaattctgataaaatatttttcgctatgaaattacaaaaaaacattcaaataccacttaaaaggatcattttgttgggttttaaatactttcattgtcactcctgcgacgacgttttcatatgttattgtatggcttcttcctttcaggagcgagcttattcattttattccttaaaaacctcttgcaagtccatgtaatatacacttccgggaaagagcactgttcgaaggtgctctttttattttttgcaaatctgaatatcctttcatacatagcacatactatacatgggcgataagccggaactccaataatcctcccttgtatttcttcacttctttttagtacaagcacctatttattaacaggtacataaactatttcgaaccttacttttcgactcatttaattgttcatgactcacaaacataacataataaatgatgtcatcttataaaacgggcactctggcacaagtgctcgttttattttgttgattttctacaaaataaaacttttataaattatttctcaacaattagcacatagaaatttcaattcgtttttggtaatatatagttaatctctatatgcttagtatatatgcctggcttcagtaaaaggacccaccccctcaatgtgggtccttctttttaaatattttctactaattaacacttattaatatatctcaataagtcatcaatctttttgttttgtataaccagcatttccttataagtatctaaaaattgttgtaaatccatctttgtacaagcaatttggcccattacaatgaagataactatccaaaaaactaattccagcccctacacctcactttcacccaaataaaatttctattttatctcatgcacatttttttaagacaaacatatagtgtattgacaatttaaattctttaagactcctttttttaaaatatttacctagagcacatacattaatgtgctcttttttttattaaatttaaaataacgtttttattttattcttgctaaccgctccgcccttgtataatcgtacctttttttacacatcctattaaaactctcttttagggtggtgctaatttgaaaaaggtatttaaatacattttaatctttttgtgtgtagtgttttatattacatttataagcggtatgatttatcaaaactttgtccgtgagcattttattcctccagccgagaaatctaagctggaacataatgatccctaattattataaatacttccctatatgagctcgttattttcattatgattaggtatcagaggagctttacaaggcgctctttaatttaaaaataaagattttgtatcaattaatgtacaacttcactttcctcctcaaatatccaatccgtatcaatattttcaatcggtggcatcgcacctaaacgttcgaaagctatttttttctgttttttgagtaactcatcaaaatcccctcgttcttccataattatttttaaatgctcaccaactttttctaaaaacctcattgtatcttccttagtgcttgttaacatccaaacctttaaatttatagggacacttatagccttcacacctgacgttacttctgaaacattaatagagtcacttaatggaattgcacaaaaatgatattgtcccactttaattccatgaccaactgcaggtacccattgtacccattcatcaaacgctagataaaaacgttgtgtttgctcattcactttgatttccattacgttctcctccaaatcaaaatttagtttgttttagcagtgttatattcaaaaaaactgagagactttttatgtttatcgcaagcgtatacatctgtaggaagatgtttcctgccttgtggatctctagcaaatataaaacctttggttgttgcatcattgtcacatccaacataattgcatttcgccactttcatttccctccaaaacaaatattttattgagttcgatgcacttttacttgagacgagcatacgctgtattatgtctcatctctcaaaagtgcctccttttttcaagagtacatattaaatatgcactttttttacatggctacaaaataacgctttggtttagttttttgaatgttcaaatgcttttttctcacaatccatgcatgcgacaatgtcgccaccttcatcaaattgataaattgatttctcttcaatatccttattttgaaagcaaagatcacaattgaattttcttttcttatccactaattcgtcactgattttcttagttagttttacagatccaatttcttcataaggttcaatgaaatagcctttctcttgtagaaatttcgtaatctctcgcatatccttccatgcttctgtaccttgaccgaattgaataattactgtattcatggttcattcctccattttttaataaaattcaaattttgtcttactttacatctacacgtgcttgacttgcttcccgactaaattccccataaaattctcatttattgtaattttcttgatataattccccatagaggggaggtgtaattaatgaaaataactaagctttcagaaaaactactaaaatacatggtaactgagtataaaaaccatgggacagatatgttctcttttgaaacatttaaagagttgtaccaaaatgagactgatgattttatttcgaaagcactctatcgtttgcgagatgaagatttagtctctgtgtatgcagcagacaatgttgcctataacactgtcttacttccacaagggattgcatattgtgaagagaataattctcttaaaaccggatacaaatttgcaaaagaagcaagatcatggttaccttaatcaacaattatccaatcatcagcaattaaatcatctgcgcagggattccacgccctgcgcggtttaaattcgttaggataaattggataatttccacacaactcatacgtatttgttggcttaatcttgaccttaaaggtcttcataaagtgtaatcgtgaaataaatttattttgttccatcgctaacttagtagcttcttgtatattcattattttcccacctcgttttatttaaacttcttcgtaatcgttgtttgtgtatgagacacttttccctttacccaatataagacttgctgtccgtagccgctctttgggggttcttcaaagttgatttttccatccaccacaatgtaaatgccgtttgttttcatgtctatttctcttttcatctatgcctgttctcctttgcattggcttgtccattttaggaaatgcatgtgctctcttgataaaaatgcccttagtccagctccataatttctttcaatgttcgattggacacatatactttaatgatttgaattctcccgtatgtttctaccgctttttcttttgcttcagcctctgtattcacttcaaaccaacgtaacttctgtttttcatctcggtcaaaaaattctactgcataggtaggtgttactgaatgattagagaggaatttctcagccgtactatgcgctgtataatccatgtttcctacgatatcttcaaaggttaattgttccatacactcaactccattcccacaaaatgattgatttctcccctttaccgtctataactttctccctcgacttcaatcaaatagtgatttgccatccctagcaatctatcagcagctgcaaacccaattttttcaggtaaggtatattcatcttcatttgagctaaaaatgatgggcgctttacgcttatatcgctcattaatgatttcgtagtacatttcttcacgagattctgtatgtttgctcttacctagatcatcccaaaccagcacatccgcatactctacgactgtatggagcttttcaaagtactcctttttatcatcacgctttgctgacataatctctgtcataaaagtgacatcacttatacaaactactctgcaccctctcggttgtgcatttacaatgtctttatttacagtttgaacattttgtataatccacctagcagctgctatttgtagatgcgttttacctaatccgtaattgttgtgaagtttcattttctcaacccgttcattgatggataaggcttttaaccttccctcgccatatgtagcgatatatccaaagctattgcgcttcgtatccctgatttcattaaacttttttaagtattccatcatgctgttaaacattttcttttgcatatcggtatgacgaatataatttttaaaacgtgcttcttcaaattcttctggtatcattgcatttttcaaccttgctatttcagattgtttcttttggcaatcacacattctacctgtccatccatttaagatcattcccgttccactgcataacggacaggtatcattaagcgtcttctccgagccattcaatgttattttcatattcttgttgtgattcctctcgttccttgtctgtaagttctctccacttttttgttggttctggcaatttttcatagccctcttttgcaaatctgccatgacttccgctatgcttgcgaatctgctcatttttcttcacctcgtgttcttctttggcttcaattactaacctgtcccattgctttctcaacttactaggtgacaatatattttttttccagaaggaatgatcctgagaccattccaagagatacacaatttgttgatttgttttcttgtctctttcgcgaattaagcggaattcattggcccacttctcgaagttcggctctttatgttctggattggtttctaaaattaactggaataacaatttggcatgctccatgtcgcaagtttcaaacttgtgacaagaagtctttttatttgtagtaatctctgtagtattctctgtagtaatctttgtatttgtcccacgtttcaatgtaggagcctcctccgttttagttcatttgtttgttttgtggtataagattgtacgttgttcttcttagatttaaagcgcggtgcgctgttttgttttttgaaaaagcgtgtataagcatccgcaaggttgcgaacagacgactgaatcgcaatactatccacttcttttagccaaacaagctctttcttcatggcaggtagtttggcagagcatgtaccataggtcaagccttttcctgtctctttgtatgcttgatcccataaggataggaaatgattgaatacaaagcgagaacacccaatcgttttgttgattagaattgcttgtgcctgatttggatagatacgaaacttataggctttattcatcattatttgattcacctccatttcggtatatgactattatacaccaaacgtacattcgataggtagtggagtaacactttctgtatgtcgaacaattaagatggcttcctgccatcccttgttcgaagccaattcatctcccacctactcactgggctgtgacccttcacgctcctagaggaaggagtcttcttggctaaaatgataaagtattctgctcgtagttaatacttagcaatattaaagagaaataccaatcatttacttgtgtaaatgattggtattctttacgttagccaatataattttaatttaaaacatggtaagcattcttcctcattcatcattgcaaaaaaataaaacgagaaagattagaatgcgaattcaggtgatgtttttatcatttactaatattcgagttcacttcaatgtgcttaagctttttattttttactctattagatataggggcctatcaataatttatttaaattagattatttaggcaccctcttccgaatcccacacttcaataatatcattgcattaattttctttcggaagtacaattcttttatacaattgaactgtaatcaagtagtaaattaagtaaatcactacgaaaatgacaagtggcaaccaaattcggaaatacggatcaatcaaaagcggaccgaacatgttcataccaactaatatatgagcaatacccacaattgccggtactaagaatatgaagaataactctttataaatcgattgtgttaataccccccggcggacaccaattttacgaagcatttgataacgtgtgctgtctttcgatgcgccagatagaattttaaacattaggcaacttgccatcattgctaagaacgcaattccaacgaagaagcccataaacatgaatccactggccataccatgactcagattatacatttgatacgtactacctaattcttccgctttcacatttttatatttcgctacctgtaattcatcaagttttttccattcttttaaatgtgctccaaaatcatctgttttcccaataaacacagtattttctttatccttcatactatcgtatatgctttggtctataatttttatttcatgatcaggatacatataacttggctggattgtgaagaaagcttctttccattgttttgttttcgtatcatcgttatacagtttatacagttgttttggcaatttaaatgcatccttaggaaattcctctgaaactttcatcatcttcctattttcactatcttgtgctaaaggacgatttttctctacatcttcttttatataatacacatactgatcatctactttgtagcgatattcaaacttctcttgaaataagattccactcaaaattttcttttcttccgctgttggattatgaacgactgaatcgtaaactttttctttatcagtcgtctttagaacgttatttttaaatgccataccacacgcaattccaccagcgccaagagccactaggatagctaccgttgcaagcacccgtgttaggctattaattcggaaattcaattgtgcaaaagtaaaagcattcagccctttttcacgacgttttttattactctttatcttgttaagcataactgggagaagtgatccaaataacatgtaagtaccgactgttgctgtgattaatccaatacccatgaatttaggtacagttaatagctcttttccctgtaaatgcgctatatggatcagtgatgcatacccaatacctagcaaaatcagaccaaggaatgcaactacacctgtcatttttccttttacagcgatacgctctgtttttgcatctgcatgtacaagttgtaatacagaaatacgagagaacttcatgctattcatgattgctgatactataaatagtgcaaagaaaaagaggcaagtaacagtcatagatggaatataaaatgctttataatcttcactagagaattccaactgcttcattaataactgaccaataccttctgcaagccctgtaccaactgcgattccaattgcaagagatacggcacctattacgattgtttcaataaacataagtaaggtaactttatacttttttgcccctaacatcatgtacataccaaattctttttggcgaattgataataagaaagaatttgcatataaaatatagaaaaacgttacaatcgctaatagaaaggaaccgatttggaatgcaattgcaaccgtattagcatgtggattggattcaaggaacgctttatttagtgctaatgtttgaaacatataaaaagttgaaatagatacaatcagaccaacaagtaagacaatgtaatcttgcaacttactttttaggcctgacatggaaagcttaaataacatgattgaacttccttccttacgctttttgtgtacctaagtttgcaagcacgtctaaaatttctttatagaactcttcacgtgtactaccgcgataaatttctttatatagctcaccatcttgaatgaataaaatacgttgacagtaacttgcgctgtaaggatcatgcgtaaccatcataatggatacaccttgctctttatttaagcttgtcatggcatcaagtaaactcgttgcatttttagaatctagagctccagtcggctcgtctcccaaaataattgctggttcatgaactaacgcacgtgctgctgcggaacgttgcttttgtccaccagatacttcagaaggatatttttgaagtatcgctgtaatccctaacatatcagctactttttctactttcggtccaatattacgtgatggaacaccttgaagagaaagcggaagtgcaatattttcataaatagataaattctccaataaattgaaatcttggaaaatgaatcctaacttttgtgaacggaaatcagaaagttcaccttgcttcattctcgtaatatccgttcctgcaatttcaacaacgccgcctgtcgctttatctaacgttgaaattacatttaataatgttgttttaccagaaccagaaggccccataataccaacaaactctccctcttgaattgagaatgatacaccttttaatgcgtgtgattgattctcaccttttttaccgtacaatttttgaatgttctttacatctacaaccggttttatcatttatatcctcctacatttttttatttcattacaataagctactaaatttgtttactactaacaaaatagacatgttacctccacccttaagctacaatgaaatctttccttttatcttcttcactcacctcatcactttgaatacacccatgataaactatgaaaattaggaaacaccccgtaaaatccttaagatttcttaagttttaaaaaaagcttatggaacctgtagttccataagctttctatctaattggatgttcaacaataaaagacatccaaccatctttatattctgcatgtatattaccatgatgaagttcaacaattctttttgaaatagcaagtcccagtccatttccctgatcaccttttcttgccttgtcccccctgaaaaacctttcaaacaatttatttggatcgctaacaggcggtctctcaactttatttgatactttcaaaattgccttgttacctattagttcaagacatatagataattcggatggtttcatgctgtactttatcgcattcataaacagattttcataaacacgtaccattttttctacgtctatgaaaataggtattgtttcttccgttattgatttttgaacgattagaccctccttttcaaatataggaatgtattctccaactatttgttctaacaaacctgataaatcaacttcattaaggtttaacttaacatcgatgcctgataaacgggtatattcaaacagttcatcaattaaatatttcaatctctttgattttaaataagtggtttcaaggtattcctgtaattgtgtgttactttcgtattgtcctctttttaataaatctatataaccaataatagatgtcaatggtgtgcgtaagtcatgagatatgttagttatgagttcattttttgtacgttctaatcgtctttcctgttcaaatgtattttccaattccttggacatatagttgatattttgaacaagttgggtcaattcgtccttccccttaatcccaatggtcaaacccagttttccattggcaatatcattcacattatcagaaatgagcttcaaatatgctattttctttcggaccaatatcaaaaaaatcactataaagttaaaaattgcgaacgagaataagaataacaatgataaattgaattcaaacataccaaactcttcgtgttttttaaataatggatctatgacgtatagcaccataaggattgttaaaccaaatgaaacaaaaaaactaactgcaacagcaccaagaagttttataatgatcttatttctgaaactaacattcttcatattttatacccaattccccagacagttttaatataaataggatgtttagaatcctcttcaattttgtctcttatttttgtaatatgcaccatgacggtattatctgatttataaaaaacttctttccaaactgcttcatatatttttgctacactcaggacaatccctttgttgcgggcgagtagttcgagaatagcaaactcttttggagttaaccttgtttcttttccccttacccatacttgacgagtatctgtattcacggtcaagtcaccaatttctagaatacttttattatgttctatggccgtattgtattttttaaaccttcttaattgggattttaccctagcaattaattctagtgggttaaacggttttgataaataatcgtctgcaccagaggctaggccctgaattttgtctatatcctcagattttgcagatagcataatgataggcatattgcgatcttccctaattttcatacatgcttcaatgccatccatattcggcatcataatatctaaaataatcaaatcaaattccttttcttctaacagttgtaaagcttctatagcatcttctgccttttgagtttttaggccttcattttcaagatatacagagataagatttctaatgtctttatcatcatcaacaataagaatatttgactccatatgattcctccacatttttttcgtattgaaaaactacagacataagcagttgaaacatttctatcttctcttttttataaacttgcaaacggaagatatgaaataacataatagatacaagtaatatcgtttccccctaatttaatgttcaatatttactgctgaaccatctacaatacatgagtttccttttgcttttaattaattttcccgtgaatacacctgtacttagtccatatttgacaatataatttactttttttcaaatcagcttcttcaatcaatttgtctccaagaaaccttgaactcggaagaggctacaccaactaatttttagttcattatatacaaaaataagaaagcgaattgttttcatgtttaattaccccactggtttgaattcataattatactctagagtccaaaccttaagaaaaaagggcaaaagttcttaagaattcttaagctttatacaacagtttgttcagaagaatatatggctactcttgaaatattcactattagcttctcattttgacactcccacggctaaagccgcaagtcctataacttacggtgtaacggatgggattcttgaatgactaagcattcgcagtccatttctgttttgaacagccttcaagatgagggtgtgccatcccccctcctaagacagaccttataggttcttaggctgattgactattaccgccaatcacagttgcgtagcgaatattcatcgccccaacgatatcaagatgtttctcaaacccacattggcacttgtattttctgtcttgcgccttgttttttccagaacatttcggacatgtttgacttgtataagaagggttcacatattcaacctttatgccaactaatgtcgctttgtactcgatgaattgtgctaaacgatggaatgaccaagtgtgtagatttttttcgtttttacggcttgttcgtgccgtctgtctaatgttcgttagttgctctaatcgaatgacagaaatattattatccgttgcaaaatcaacgattccacgacttactttgtggtcttggtcttgcatccatctttttaatttcaaatactagcgaagaaaagttagagaaaataattctctaagaactacctatcgttgtatacgttatctctactcatatattatactattgttaacaccatacctcttccacgtactacaggaaagctgttatatcccatgatgtaatacctcacttttgtttttttaactccactacaaacaaacatgtgttcttttttaaggtttgaaaagggaccattttgttaacatgaatattcaaaaataattttttcaagttagaatattcaaaaacttatttatgcaaacaagcatgtcatgataacatttaacaaaagggggtagaagtagatgagtgttgacattatttctaaagaagaaatcacaaaattattaaacgaatggtatcaagctatgatttcacaacgtgtattacagtctcagaaaataaaagaagatattgcaaataaaatcaataatattaaggaagaccaaacaatattagtctactacgctttattgaatgcacgatataaactgctaattcgggatatggatagtacaaaagatattctggacaaaatcgagcctttatcagagtctacagaaacatttttagagtactatcatcatttatttaaagcaatttacgctattaataaagcaaaccatagtgaagcaagaatgcaatttgaaaaagctgaaacgtttttagaatacatgcatgatgaaattgaaaaagcagaatttaattattggcttgcagtccattactatcacgtattaaaaccgatcctagcagttcaatttgctacaaaggcgaatgaagtattttcaattagtccagggtatgaattaaaaactgcagcatgcttaaatactttagggatggcacacattcgactaaatgaattcgaaagtgcagaggaatatttactttcagcactaggtaccttccaaaaatctaatgatgaacttcttattaaacgagttaagcataatttaggacttttatacgcaagtcaaaacatgccagagttagcaattaaacacttagaggattcattagaaaataacgctaaaactatgtttcttttagcaagagagcattttaagttaggttatagtcatatcgctaatgaatatattgagaatggctataagattagcgacttatgttatcgtcatcatttccgaattttaaaagcagtacataactatgtaccgcaagaagaattagaaaatgtggttatagaaggtatttcgtattttgaaaaagaagaattatatgattgggtaaaagaatatgcttatcttttaggtaatatattctatggttcagaaaatcacgaaaaagccagcaagtatttacacatcgctttagatgcagacaaaaagagtatagaaagaagggcgctaaaatgaaaaaagcaatcttattaatgatgatgttatccgctgtttttacttttggtcttactaatgtaaaagacataccacaaaacgaagcaattgaagtgtttatggatcatggagaacatatttaaaacctaaggaagagggcgcttatagtgtcctctttttaatatctattatttatatgatgaggttgcaggtacgtcttttggttattgtttgataaacgtaagatgtttctaaaaatgtgtatacaaaggtgtaattttgtactgtatatgttcacgtactatataaaaaagtatgaaaatctataaaaataattatttcaataaaatttgttttagatattaaaaagtgccaaaacccttgtggtataaggggtttggcacttttgtgttttttatattttatcaaataaacaattctaaaactgttcattcttctcccaagattcaacgatataatgtgcgatcgtcggattgaagcctttaccaactaaaaacataatcgcagcaacttctgttaatgcgtgttcatgtgatgtatgttttgcttcatttaaaccgtaatctacccatggttttacgaaatctagtacgggtttcttgaaaggtaaaaactgtgtaccgacaacttgttgaatttgttgttgtgttggttcagtaattggtccaggtggtaagatttgtggttgagttggatctattgttggtggtttaggtggtgagacacgtacgtcgtagtttggttgatacatttgttgttggtattgcggttgttgtggttgagttgtgtatggattttgttgatattgttgttcttggttttgtggtgctacatatggattttgttgatattgttgttcttggttttgtggtgctacatatggattttgttgatattgttgttcttgattttgtggtgctgcatatggattttgttgatattgttgttcttggttttgtggtattacatatggattttgaggatattcataatttggacgtgtttcatatggattttgttgaaattcagtttcttgattttgcgttgttgcatatgggttttcgtcatattgtggttcttgctgttgtaactcttgttcttcgtattgttctgtgtatctctgttcttgttgttgaggatacaatggttgccttggataaggcggttgattattatagaacatgtttattcctccttcatgatgatgcctaccacctagtgtatgggcggacaagaaaatatgtgatgaaaaaatgcgggcgtgttacaataagtaactgggtgaagataaaatgacaaaacaagaaaaaattcaaaaaacaattacttttgtaaaacatattttagaaaaagatgcgagtgggcatgattggtatcatattgaacgtgtacataaaatggcgatttctttatctgagcaagaaggtggaaatcgttttataattgaaatggcagcattacttcacgatgtggcagatgaaaagctaaatgaaagtgaagaagcaggaatgaaaaaagtttctgattggttagaagagctacgtgttgaagaaaaggaaagtaaacatattcttcatatcatcgccaatatgtcttataaaggtggccatggcggtaaagtggattcacttgaagggaagcttgttcaagatgcggatcgcttagacgcccttggagcaattggaatagctcgtacctttgcatatggcggggcgaaagggagattaatgtatgacccaactattccgccgcgtgaagaaatgacgaaagaagagtatagaaaaaataatgatccatctttaaatcatttttatgaaaaacttttgaaattaaaagatttaatgaatacgaatgcagcaaaacaagaggctgaaattcgtcatcgttatatggaacagtttattgaacaatttatgaaagagtggaatgcacaaatatgaaaatgttaactgtggagaacttatcaaaatcatatggagaaaagccgttatttgatggattatcatgtagtattacagaaggacaacgtgtcggaattatcggtgtaaacggaactggtaaatcgacattattaaaaataattgcaggattagaaactcctgatacaggtgatatgacgtattcacgtgggtatacaattagttatttatcacagcaaccagagtttgatgaaaaactaacagtattagagcaagtgttccatggtgatacacctttaattcgtcttcttcgtgattatgaaaaagcactattaaatattgaaaaagatccaagtaatgaaaaagtacaggaacaattatttgcagtgcagcaacgtatggatgcaatgagtgcatgggaagcaaatgcaagtgcgaaatctcttttaacgaaattaggaattacagatttcactgcaattgttgggaatttatctggtggacagaaaaaacgtatcgcaatggcacaatgttttattgaaacacctgatttattaattttagacgagcctacgaaccatcttgaccatgagacagttgaatggttagaagaatatttagcaagatatacaggtgcggtattacttgtaacccatgatcgttatttcttagatcgtgtgacgaaccgtatttttgaattagataatggtaaattatatagctacgaaggaaactatagtacatttttagaagcgaaagcacttcgtgaagagcaagaattggcacaagaatcgaaacgccaaaatttatatcgtcgtgaacttgcttggattcgtcgtggtgcaaaagcccgttctacgaaacaaaaggcgcgtattcagcgttttgatgagctaaaggaactagaaggaccagctgcaaaacagtcagttgatattgcacttagcggtagccgtcttgggaaaaaagtacttgagttaaaagatgtaacgaaaaaatttggtgataaaacggtattaaacaactttaatcatattgtgaaaccaggcgatcgcatcggaattattggagcgaatggaagcgggaaatcttcgctattaaatatgcttgcaggtaagttatctcctgatattggtgaaattgaagttgggcaaactgtaaaagttgcttattatacgcaagaaaatgaagagatgaatttaaatcagcgtatgattgaatacattaaagagattgcagaagttattcatacgacagatggaaaagtaattggtgcatctcaaatgttagaacgtttcttattcccgacgcattcacatggtacaccgcttggtaaactatctggtggtgaaagaagacgtttatatttattacgtattttaatgggagaaccaaacgtacttttacttgatgaacctacgaatgatctagatacacaaacattaacagtactagaagattatttagaagatttcccaggtgtcgttttaactgtatcgcatgaccgttacttcttagataaagtagtagatgaactgttcatctttactggcggaggcgaagtgcgtgaattcctaggtagttatacagattatttagaaatggaaaaaacgagagaacttatggagaaagcggaagttcaaaaagagaaaaaagtagtagaagaagctccaaaacaacaacgtaaacgtaaactttcatataatgagcagcgtgaatgggaaacgattgaagatacaattgccgaacttgaagaaaaaattgagtcaattggagaagaacttgcgaaagttggatctgacttcacaaaggcacaagaattatctgaagcacagcagaaaacagaagaagagctagaaaaacagatggaaagatggagtgaactatcagacatcgttgaaggattaaaataaaaacaagctgcatatattgaaaagtaaagagaaaaactttacactattggtagaacctattttaggagggaaaaaatgagaacatctaatccaatgttgaaaaaagaggcattccgtaaagagggagcaagcgcttctgcgatgacgattggcggaacagtaggcaaaacgttcattatgcttatcttgctacttgcaacgtctgtctattcatacatacagatgatgcaggggacgatgaagatgccagtattaattggtgctttaatcgttgcggcaatcatcgcattcgcgtctatgttcttcccgcgcatttcaccttttggtgcaccaatctatgcagcggtagaaggggttgtgttaggaagtatttcagcagtttatacaatgaaatttggcgattctatcgttttaaatgctgtattactaacaatctcaattctatttgcaatgttagtgttatatgcaacacgcgtagtaaaagtaacggataaattccgtacaggcgttatggcagcaacacttggaattatggttatgtatttagtcgtattcctactaaatatgtttggtgtaactgttccatacattcaccaaggtggtacaatcggtattattattagtgcagttgttattgtagttgctgcattaaacttattactagatttcgatttaatcgaaaatggtgtacgtagtcaagctccgaaatatatggagtggtatactgcgatgggactaatgcttacattagtatggttatacttagaaattcttcgtttcgtttcttactttacgaaaaatgactaataaaaaaatcctgcatgaaaaatgcaggatttttttattttcaaagatatattgaatgtatggtataatatggatgatagcaacttgaagtgaaggagatggaatatgatgaaagagaagaaggggattatgaaaaaattattttctaaaagttttttcatagaactagatgaagctttaacgtatccatcatcaaaagttattacttcagcgattgaaggatatgcaactgaatgcaatgaaagactaaaatttgagagtaaagttaaaccgattactttctacttagaaaatgtaatgtaccgtgctgaaataaagatggctcgcggaggatattacatatcttgtactgaagtgtaataaattttgaaactatacatgtttgaactatgtatggtttctttttttgttttgtaaggtccaaaataatactttctacttacggatatatcattttgtgctttttaccattcaaacatttctccttacaatgaagaaaaacatgtgaggtggtataacttatgatgaatcttctctgtacataatagtgctgaattttaaaaaaatgtacagtatggggtactaacacatcactatcaagctaagattatacaatatcaagtatagtagagattatttctttcatttgtttgttttgtggtataagattgtacgttgttcttcttagatttaaagcgcggtgcgctgttttgttttttgaaaaagcgtgtataagcatccgcaaggttgcgaacagacgactgaatcgcaatactatccacttcttttagccaaacaagctctttcttcatggcaggtagtttggcagagcatgtaccataggtcaagccttttcctgtctctttgtatgcttgatcccataaggataggaaatgattgaatacaaagcgagaacacccaatcgttttgttgattagaattgcttgtgcctgatttggatagatacgaaacttataggctttattcatcattatttgattcacctccatttcggtatatgactattatacaccaaacgtacattcgataggtagtggagtaacactttctgtatgtcgaacaattaagatggcttcctgccatcccttgttcgaagccaattcatctcccccctactcactgggctgtgccctccacgctccttgaggaaggagtcttcttggctaaaatgataaaactacttatcttattaaattaagtagttttatgaagtatcccagtttatagagcaggataattataatttcaaaatataaaaacttttagccattgttatttcattacctatgtttagttctgtaatcccagttttagaataagtctttgttgaagaatgtatacaatagaatatcaaggttctattagatgaaattctgaaaagtaaattacgtacagtgctggagatagaaggttttttaaaacggcaaaaaattagattaacattagactgtgtgaacaaattgaactataaataagcagctgcactagtaacagtattaaggcttattttgctactcttccatataatgcttctagaagctttaatttaaaaggaattccatttctattcgtacaaaattgacactcctcccctaaagtggccaactaacgtcagtaggattcttgctaccaaaggccaaatccatttcttgtaccgctgaagtgtaaagattgcggtgtgccatcaccaatcccacaacagaccgtatagtttcgtaggctatggtactgtgatcataccgtacagattgttggttctcaaatgtatttacgtcttttgcatgactatgaataaagtataccttgttttgctatacaaaaacgatgagttcatcccaagtctaaagacggactaaagtcctgcgtaggcttttctataccgtaaattctgtgaacggtattttaaaattgtggtaacatgagcctagatataatatattcaacaaatatcttaggatgcatgagatataggacattcctttggcaaggaagtctctgcccttaatgaccgtgaagcgtctcatcctagtgaaagggataggtaataattattgttcttaaaattctgaattttatatattttatttatacaaagtaatttgttacttattttatattttattgttagaatggataccaagttgtaggaggtgatttacataattaccaatattatcttttcaattttagaaatatggaggagggacgagattgttaagtaatatttttttctttgattagatttagtaatatcattaaaatttatttttttgtatatgataattaaaaaataaaaaaggatacacataaaaaggagatgctaataaatgaaaataccttgttttgttatgcgtggaggaacgtcaaaaggattattttttttagataaacatttaccttcaaataaatcaattagagatgaggttattttaaaagcgttaggggcaggaaatgctcgtggtgttgatgggatgggtacgttagatcctttatcaaataaaattgcaattattcgaatttccactacaccaggaatagatattgattatttatttttacaggcggatttaaagagaaggatattagacgatagtgtaaattgtgggaatataattgcagctgttgctccttatgcagtagagagcggattgattaaagtcgggtcaggaaaagaaactataacaattagaaatttaaatacaaatgtaattgttgaatcaactatagccactaaaaacggaaatgttgtatataacggagatattaaaattgacggtgttccgggtacaggagctccgatagatttgaattttaaaaattcaatcggctcagttacagggaagttatttcctacaggtgcaaaaacggatgttattaatggaattaatgtatcttgtgtcgatgtatcagtgccattaattataattcgagccagtgaattaggaattataggaaatgaaagtccagatgtgttaaatgcaaataaaacatttttacatgacattgatcttattagaaaaaaggtggcttgtcttgcaaatttaggtgatgtatcaaataaggtcatccctaagattgcggtaatttcaaaacctagggaatctggcactattacatcaagatattttattcctcaccaatgtcatagcactcatgcagtaacaggatcgctcgcattatcagcagccataaaaattaatggtacaactgcataccatgttgcaaaaaataatgatttaaataaaatgaaaaaattgaatcaaattataatcgaacacccagcggggaaaattcaaacagaatcagttattgaggagtcatctaatggatatgtaattaagaaatctagtattacacgaacagcaaggttactttttaaaggcgaattaataataccttgatcaatgcattgtttttcttgatatagttttaatggcacattttttaagcaccgagaaatttaaagaataacgtttctcggtgcttatatttattaaggaggcttaaattaaatggataatcttaaaaaagcgacattttttatggttctttcaggaattagcttttcactttctggattttttgcagaacatgctattatatcaggagatttctttgtaactttaacagcaaggttttttattccttttctattcttagtcccttttattataaaaagaatggggaaaatttcattttggagtaatagttataaacaattacctcgagctttttctattacattttcacaggcattattttttttatgtgcagctaaaacctcacttttcatagcaatggttttatataatacaggtcctatttttatctgtcttattacccttttttcaaagacgagacgtgcgacaagagcagaaatattggcagcatttgtaggtttttttggagtgtttcttgttttaaaaaccggtggtattgattatgaatcattcctttatttgggggtaggtttactttcaggattatccttagcattttcacaattttttttacatagaagtgcacagacggatgataatctatccattatggcctatacatacctatatggaacaataatatcgggtgtactctctgcatgtttttcaaaggggaattatattggtgtatttacgaatagtacaatggtactagtatttttatttttaatggcaatgggaagtttagggaatcaatggtttagaggaagggcgtataagttaactacgagaatttcaaatttatctgcgttgttatatttaaacattttgttttcactgttactagatatattgtttaataatagtattccatcagttattcaaattacaggtgctatttttgtgatgggtagtgctgctattccaattatagtacgtgtaaataaacagcaaacagaacaaagaagggcagcaagttcataaaaaatagagtagataaaaggtttccttccacaaaaacatgtagcagttgtgaaagatatgtcattgtctgaacaagtatattcttgtatatacggtgcaaatcttcatagagattatagtgcagttattaacaacaatgaagcaataagcctattagcatgaatattaataaagtagcctttggaacaagagatttagttcgaccgtcttaggatgaatttcttagctattaaaagcaaagactaatcgagatgaactcacttcgaacagtttgttagaaagccaagtggcgaatagtagacctgacctagattcgaatattcattaaatttaggatgttatagagaaaaacgttatatttatgtatatttttggaagttcctgtgttgtaattcactttgtgaagcattctaaagttcatctctttacagttttttaccttattattctctatgtataatactattgacgaagagagtgtatatcctctcttctttttttatcattttagccaagaagactccttcttcaaggagcgtgaagggtcctagcccagtgagtaggtgggagatgaattggcttcgaacaagggatggcacacagaaagtgttactccactacctatcgaatgtacgttaggtgtataatagtcatataccgaaatggaggtgaatcaaataatgatgaataaagcctataagtttcgtatctatccaaatcaagcacaagcaattctaatcaacaaaacgattggttgctctcgctttgtattcaattatttcctatctctatggaatcacgcatacaaagagacaggaaaaggtttgacatatggtacatgctctgccaaacttcctgtcatgaagaaagagtttgtttggctaaaagaagtggatagtattgcgattcagtcgtctgttcgtaaccttgcggatgcttatacacgctttttcaaaaaacaaaacagtaccccgtgttttaaatctaagaagaacaacgtacaatcttataccacaaaacaaacaaatgaaaacattgctgttgtaggaaacaaaataaagttgccgaaactaggtctcgttcgatttgccaaaagtcgcgaagtaaaggggcgtattttaaatgctacagttagacgtaacccttctggcaaatactttgtgtcattgttagttgaaacagaagtgcaagaacttccgaaaacacaatcttacattggaatggatgtgggactaaaagatttcgccattttgtcagatggaaccatctataaaaatccgaagttttttcgatcattagaagagaagttggcgaaagcacagtgtgttctttctagaagaataaaaggatcttctccctggaataaacaacgagtaaaggtagctagaatccatgaatacatggcaaatgctagaaaagattacctggacaaaatctcaaccgaaatcatcaaaaaccacgatgttatcggtatagaggatttgcaggtatcgaatatgttaaaacatcataagttagcaaaagccattagcgaggtatcttggtcacagtttcggaccatgttggaatataaagcaaaatggtacggcaaacaagttattgtcgtatcgaaaacctttgcttctagtcaattatgttcttgttgtggataccaaaacaaagacgttaaaaatctaaacctacgtaaatgggactgcccttcttgccgtacacatcatgatagggatattaacgcaagtatcaatttaaagaatgaagcgataaggcttctaaccgcaaggactgcggggatagcctaatcaattagagttcgatagaactctttacttaggaatccctcacttctaaacgaagtgaaagtgggggtagttcaaagatcttgtatttcttttttagtgaatagctttttagtcattttaaaatttctccggttctaaattttctttctataatacaagaaataccctatcgaatagatttttttacggtctatttaatagggtacattttatacagatatttacttttataataagtgtgcaagttttgtaatagtgctctatttattctaattggagtatttaagctagatactcctatatggatatgtaattttacatatccatataaaagacagatatgtattaatcactattaaattatattgatatcatttttaggtgagggattcatttagatataaaggaattaatggatttttatgtttaattatcatagtataattatttcactttatgaaatgaaatttggatttaactttttttaaatataatattatataatttgaatgaaaaaatatctgaaaaatcaaatttaatcaaagcgattttctggtttacttatgaaaaacatagtgtttaaaatgagggggaagtaagctccttatattctatcaaaaataaataaaaaaaagagatgtaattacttttttgaaaaaatctctatcttcaagtatgtgtgaagaaatcctaacgttaggttgtacaacatttacgatcaaaacttgtaaaaaacaatagtgaagaggtgtacggaatgaagaataaaattatgacaggatttttaataacatcaatcgttactggagcgactattcctatcaatactctcgcaacgccaatcgttcaggcagaaacaaaacaagaaaatatagatatttcctcagcattacgaaaaataggtgcacactccaaattaacacaaacctttatcgatggagccttatcaagtccgaatgtacaacttgaagaagttccatctttaaatacaactcaatttctaattaaacaagatatgaaagagtggtcccctccagataaaacagtattgagtccatcatatcagatggactctttttttactgtctacctataggggataataccaagcgttcagatgctttactctttttttacattagtttagacaagccttaataatagtttattaaaatgaaagtgtattcattcattatattcactgtgtataaagttataatgatatgaacatttgcatattttaatttattgatagaaatttcgtgaaaggtgggatattctagtcataggttaaccggacgacatcataggatcctaacaaaatgtttacaataattcaattataaaatggaggattttatatgaaaaagaaagtacttgctttagcggcagctattacattagttgctccattacaaagtgttgcatttgctcatgaaaatgatgggggacagagatttggagttattccgcgctggtctgctgaagataaacataaagaaggcgtgaattctcatttatggattgtaaaccgtgcaattgatattatgtctcgtaatacaacacttgtaaaacaagatcgagttgcactattaaatgaatggcgtacggagttagagaacggtatttatgctgctgactatgaaaatccttattatgataatagcacatttgcttcacatttctatgaccctgacaatgggaaaacttatattccgtatgcaaagcaggcaaaggaaactggagctaagtattttaaattagctggtgagtcttacaaaaataaagatatgaaacaagcattcttctatttaggattatctcttcattatctaggggatgtaaaccaaccgatgcatgcagcaaactttacaaacctttcgtatccacaagggttccattctaaatatgaaaactttgtagatacgataaaagataactataaagtaacggatggaaatggatattggaactggaaaggtacgaatccagaagattggattcatggagcggcagtagttgcgaaacaagattacgctggcattgtaaatgataatacgaaagattggttcgtgagagctgctgtatcacaagaatatgcagataaatggcgcgctgaagttacaccaatgacaggtaagcgtttaatggatgcacaacgtgttactgctggatatattcagctttggtttgatacgtacggaaatcgttaagtatttaaaaaaggtcaaatctcagaatagagtatttggcctttttatcactatacaatacatggaggtatgaaacgtgaaaggtaaattgctaaaaggtgtacttagcttaggtgttggtctaggagctttatatagtggaacgtcagctcaagcagaagcgtctacaaatcaaaccgatacattaaaagtgatgacgcataatgtatatatgctatcaacaaacttatatccgaactggggacaaactgagcgtgctgatttaatcggggcggcagattatataaagaatcaagacgtagttatattaaatgaagtgtttgataatagcgcatcagatcgtttattagggaatttgaagaaagaatatccaaatcaaacagcagtattaggtcgtagtagtggaagtgaatgggataaaacgttaggaaactattcatcttcaactcctgaagatggtggcgttgcgattgtgagcaaatggccaatcgctgaaaagattcaatatgtatttgcaaaaggatgcgggccagataatttatcgaataaaggatttgtatacacgaaaattaagaaaaatgatcgctttgttcatgtaattggtacgcatttgcaagcggaagatagtatgtgcggaaaaacttcacctgcatctgtacgtacagaccaattaaaagaaattcaagactttattaaaaataaaaatataccaaataatgagtatgtgttaattggtggtgatatgaacgtaaataaaataaatgcagagaacaagaatgactcagagtatgcatctatgtttaaaacattgaacgcttctgtaccatcttatactggacatacagcgacttgggacgcaacgacaaacagtattgcaaaatataatttccctgatagtcctgctgagtatttagactatattattgcaagtaaagaccatgcgaacccatcgtatatagagaataaggtgttacagccgcaatctccacaatggactgttacatcatggttccaaaaatatacgtataatgattactctgatcattgcgaattgcatgatatcaactctttaaagggcgtaggtcacgaattggtaacgaaaatgataaatcttgttccataaatgcaaccacttctgcttgttttgacggatataaatgactatatgtatttaacgtcgttgacacatccgaatgtcctaggcgctgggctaccacaagtggactgacacctctatttattaaataagatgcatgggaatgtcgaaattcatgaagtagaatttttggtattccagaagcaacaacatatttggcaaaacgtttatgaagggtagctgtcgctatacttgtgtaaaattcaccaaatacaatataatcattttttatcggtgctcctaatgtagcatgttcttttaatgttttcaataagtctatgacaagagacggtagcataataatacgatttgatgctttggttttgggttttgtaacttgtctgttatagttggttttattaatattaattgatttttcttcaaagttaatatcttcccatgttaatgctagcaattcgccagttcttgccccgctataataaagagtcgtaaaaaaggcttgatacagtaaatcatctactacatgaatgaattgtttaaactcatcaaactcccaaaagtttaatcgtttattcgattctttttcaaagttgccagcaatttttgctggattacttgtgagaccaaaaaactttattgcgaaattaaaaattgaggacagtacggtatgaatctttttcaaataaacagctgaatacttatgaataatttcgttttggtagatcatgatatgcttagcagttatgttgttaatttttgatttcccgaatttttttagtaaatgattttcaaggatggctttaattgtgttaattgaagactgttttcttctctggcaataccaatcaaaatagctatcagcaacttgagcaaaagttaaacttgaagttgtttctttttccactaacattttggcttccgcttcacgagcttctttttttgttttaaatccacgacgttttacttgtttttgagtgccatcaaactgacggactctgacaacgaagaaatatgttccgcgttctttatctttgtagaccaccatagaaaatcctcctgcatatataaagattgataattcgatttattgagtagattataacttgtttgttaccaaaagaaaagatgtcctaatcagaacatcttaagattgataaaaaaataaattggctggttaaacatatattagagtggctggttctaaatataaccatatatgttagaaagttacgaattcagagttttgaaaatgattgttggtttttcagttaaacaattgttgagaaagtttcctgaatgctgattcacatatgtatacgtgttataataattgtgtatatgtttcacgataaactcagtaataccaagggtttatcaaactgaaaaataataattgaacataaataaagacccatagaagcgtgtgtaagaggtgcgagctgaaaattcctcttacaccgtttacctaaccatcgcttaggaaacaactgccccgtatgagtcaatcttagtatatcatgtttccaaaatattaccattgagaaagttaggatggaggatttatgtttggagaagggggagtttttatgtgttttcgtaaaaaaatatgtgatttaatcgaagacagggacgatctaaactttacagatgtcgcaaataaaatgggtgtttcaaaacaatatttacaaaagtttaaaaatcaaggtaacatcagttttcctaatttactgagattggcttcagttgtaagtacaaaaagtgaagagctttcaatgtttttacatgagtggtgcgtagaattagatagtacagaagccattaagcatagttttgaatatgcagcattggttcgtgataaggttttattgaataaattactagaaaaacacaaaaatgaatctggtacagttgcagagtatgtaaatgtttatggagtattatataagtatatgaatgatgaaatttcaggtactgaaattattaagtgcttaaagatgtataaccgtccttctgataacatgttaaatattttgattgatattatgaaatgttacgattattatcatcaaaagaaattcaatgcaatgtttgatttggttgacgaaattgagaaagagttaatctcaattgatgagagtgatcgtaaaatgtttcttaaggaatgttatatgtatcgacttgcagaagtgttttccccgcttaatctacaaagaaaaaatttagagtcttcaagatattatgccaagttattaatagaagcaaatctatgtacaaaaactgtttcagatgctttatatttattggggatgtcatatttaattgatgatgaggaactttgtttagagtatttacaggaaagttataatttatccaaaaaagtaaatgacgcttcaattgaagcagcagcgcgttataatttagatgttgtcaaaatgtatttaaaccttagtttgccattagattcagatgtacgtttaatcaattttcaaaataatcccacagatgaagattcacgagatggattaaaagaaattttaaagtcaaatggagaaagagattttttaagactttttctagcaatcactgatacagagcctaacagaatatacgaatgttttaaagaatttcttgttcaatcgaactacctctttgtaagtttagtagctaaagaaataaatagaagaggggataattccttgctagtacagcaaatgattgattataatatggataaaggagtggatgaaaatgaaaaaatttactttagtactttgcgccttttcaatgttagctgtgagtagtgtttcgtataatattataaaaaaaggttcatttcaatctgtagaaattaaaccaggtggctaaaaagcgcagcatatgctgtgcttttttatttggggcagctctattaatgagactgagttttatcggtaaactaaaaaaagaaataaagaatttgtttactcttctatttttcctttcaatatatgataaaattttcgacaaatagagcctaaactgttggaaaagagtaaataaaaatgggattaaacggacttatagggggaatagaaatgacgaaagaagagatcgtagaattatttttgaacacagtagatgaagctaaaccggaattaattgaagaatatatagaagaaagttttagaatttaaaagatagcccgtctccaatatgaggggctattttttttcgttattatgatattcttctaatgttttggttatcgccaacatctgttgaagtacaatttcctgtttttcctcagggagcgtatctaatcgttccataatttccttaaattttgtgtgtttctttatatctaattcgttaccacgtcctagtaggaaatcagttgttacttctaatgtatcagataattttgcaatggtatctggtgaaggaaagcgttcttcggattcataataaccaattacacgagacgaagctcctacctttttccctagtatttcttgcgtccagttacgttgttttctaagtttttttattctagcccctatgcccatcaatttaatcacctcataaagttattcatttgaacaacttgttctctttgaggttaatcatagcacattatgttcgaaaagtcattgacaatgtataaattgttcgatatgattgtaatcgaacaaaacgttcttacaggaggtagacatgaaacaatcaattatttatcataaaatcgcagaacattgtggagttactgaaaggtatataagaatgctagataaaaaagagcgtagcccatccatggaagttgctaaaaaaatagctgactttttagatgaatcaatagaggagattttttttaaccccaatacgaacgaaacgttcgtttttgaacggttttacccaaagttaattgaaggaaacgcttcaattaggcgttgatgtaaatataacctatatagggagtggtatccatgcacaaaaacttatttattgctcgaaaagagcaacgcatgacgcaagaagcaactgcaaatttaatcaatatagccccaaaaacatattatttaaaagagcacggtaaaagtgatttcactctaaaagaagctcagaaactagcaaaatacttcaaaacaacagtggatgagttgtttgcaaaataaagagaaaaggggagagaaatacgcatgaaaaacggtaaaaggccaactaaacgagagaagatacatatcaattcatataatttaaatcctgataattggctaatctttaagattaacaatagtataatatatgagtagagataacgtatacaacgataggtagttctctttttttgtctctttgtagaagctataataatagtataaaagagatagtatttatagtatagatagattgaacagttggaggtggaaaaatgtttaaagtacaaagtattattacatcgtttggggaagaacgttggatggttttacataacaagggtgaaccagttatcccaatcatgaaatttataaaacataaggattctttaggaaaagcacctaatacacttaaaacatactgttatcatttgaaaatattctggtgttttctaaacgaaaagaataaagattacagagaagtggatataagtttattaacagaatttattcattggttaagaaaatcaacagatgatataaatactatctatttaaatgacacaaagaagttagtgtacgctaaaagaactgaatcttccgttaacttaatcactaattgtgttatcgaatttttggactaccaatggcgtagtggtcaaatcttatttaatgtaaaatccaaagttacaaaagaagtccataatacaaggcggaagtatcgtaaatttttagatcatataacacataccccaacaaccaaaattaatattttaaaacttaaggaacctaaaagaaaaataaaaaccattactactaagcaggcggaattgattcatatagcatgtaataacataagagatgagttaataattcgtattttatatgaaggaggattaagagcttctgagttattaagtttatggatagaggacttcaatatcaatgatggtagtatcactgttagagaatctaaaacacaagctggagaaaaaagaaaagtatatgtatcaaatgaaacaatgaatttattccaagattatattatcgattaccatactaatgatgtagattctaaccatgtgtttattaatttaaaagggaaaaataaagggcagccaatgcaatattgggctttgcaagctgttatacgtatattgtctaaaaaaacgaaaataaactttaccgctcatacacttagacatacatgtgcaacacaactttatgatctaggcatggacgctggtatcattcaaaaattattaggacatgcccaggtacaaactactttaaatatgtatattcatccttcagaagaaactataagaaagcactgggatgaagcccagcagcataggagaatgagaaaatgaatatcgtagctattaattctaataaaatacaacgtaaagttatgaacgaccttaaagggtattgggctttagatgaatggaaaatcgaagagtttcccctgccagatagaagaggaaaaattaaagaaacaaaaaaaattgttgatttcaataaaattagtaatgaatatattaaactggagataaagtactattctttttattctttaaccaatgaaatttggcttttatccagctttatggagaagcatttttataaaatgtactttctttcaaaatttttagccgagaaattccctcaagtcacatcaataattgatattccttacactacattattagatgaatacaaattatatctaactgaaaataataagccgttaaaatacccccatcatcgtggaggagaatttatttcaccttatcttggagtatgtaaaagtttatatgattttttctctaattattatgacgaacgacctgaacatcaaaaagataaatggaatataaaaagactagggattccatataatatgtctcgaagagacagatttcttaatttcaccagtataaaatttccctttcgggaattagttaaaaaatatgtaaatcaaacattacttatacaccaacaaattacctttgcgaccgcccaaaatattttaaagaaaatgtatttgttttttgatttcattgtagaaacgtatccaaagtggatagatttacagaatctacaaagacaggacattgaagattttttattttatgttagaaatcgtgaaatgggaggaaagagttatacgaaaaatcgtgttcctagtaatcgtcatgtaatagagtgcctttcaaatgtcagaagaataattgaatatatgcaaggttttgaatggaaagaagcacctaaaacccctgttaacagattaatatttcccgaagactttcctcgaagagaaaagaaaaactatcacgaacatgttaaacatgtgccagattttatatgggagcaagtgttggaaaatctacataatttagattcggaaattgcacgattaatagtcattatggaagcaacaggatttagagtctcagatgtatgtcagttacaattaaattgtctagcatataagcaagatggttggtggttggtaggagatcaacgaaaagtaaatgtaaaagaacatattgttcctatttcagaagaaattgtgaaaatcgttaaaatacaacaagaatatattaacaatcatgaaaagaagcataacaacttaaatcaatttttgttccctgttcttactggaaaaaatagagggatggccttttcacaaaaatcggttacctatgcattaaatcaactagccgaaaaatataaaatccttgataaaaatggagaaatatttctatttaagaaccatgcttttcgacatagatatggggtcaatctaattaataatggtatgaatattcttcatgtacaaaagttaatggcacatactagtcctgaaatgacattaacttatgcaaaaatttcagataacactcttcgtagggaatgggaaaaagttcaaaactcagtgcgtattgacacaactggagaattaatacaagccagtctccctgagcaggcagaagaaaacggtttggaactagaatggattcgccataacatggactctattcgtttggatcatggattatgcataaagagtcctaaggttagctgtgaattcttagattattcgttagaaaccccttgtattaaaaataattgtaggagttttcatgtagatacaacatttttagattactataatgcgcagatattaaagatggaagaagatattataaagtatcaaactagcggtcgtattcgttctattgaattgattcaaccaaaacttaataagtataaggaaattagggattcattgaaaaatgaaattggaattttcggtatgccgaaacataaacgagaatatataggagaggaaagaaaaattgatggttaacaaacatccgaatacaacggggttattgaatcatgcctctaaaaaaaagagggaaacacaatatagagtgaatgaagtaatacagttaatggttaaagaaggacaaaaaattaattttaattcagtttcagaaaaagcacaggtttcaaaagcatatttatatagagaacccttaatcagaaaaacgattgaagacttacgtcaacagcaagaaggcatacatgattttaagaatataaaaagaaggacatcggatgcctccaaggatgtaatcatagaaactttaaagaataagctcaatcttttaaaatataagaacaagctattagaaagtgaaaatgagcacttaaaaacacaactgaaaaaagatttaggaaaggtttatgaaaatttataaatatgtgatatcgtcctatcagttgtaaaataacacccttaataaagcaggatttgaacatttttattttaagaaatagaatttaaatcataatgatacatattaaaatcttttgaaaatacctcttgaaccaactgaattgtttctgcgtcataaaaactatcataagtaggtaatcgtggaaaaacaggggttgtaatatcagcgtctgcataaactcctttgtaaatcatcttactcccttgataatgccaagattttgataatagatctaatggtgatttttttaatttatatacctcttctagcttcgaaatacctgtgttaaaattttctagatggatatagtttgtaacaaattcttcttctccttgtatatattgttgtgtaaagtgaggatctacttgatctaattttgtcatgtgtgcttttaagtaatacaaaaatagtttaaaggaaatgggtttattgcaagtttcatcaccatacagaaattgccgaatgggtttccatacgggattttcaatatttggtggtggaaccagagcaacaaaagaacttactgcccttctataaggatttcttactagtttgtacgtcttcttctctttagtttgtaatccattagctaattgtgctaaataatgtgtagagttcttatatacttcatactcatagttgtgaatgaacggattgtactttatcgcttctttaaataaattaatttgataaaaaaaccagtgggctagcgaagtacatccgcttttttggctccaaaacaagatgaggggaaaatctttatgaaaatgagggacacgcccttgcttgtatataaaattatatagttctatatgatccattttgaacctccattcttatatagcaaaacatgaaatatttttaataagcgataactaactttagtccactaacaccaataatgatagctaaaaatatttgaagaggtttaacgggaatcttagtggagaatttactaccaagtatgacacctgggatagaaccaatgagtaagtgaattaataaaagataatctacgtttcctaaattcatatttagtatgcttgcaaccgtcactaataaaaacgcatgtgtaatatctgtgcctactaattcggatggtttcagtcgatataaatatatcattgcaatagcaaataaagagcctgatccaacggaagtaagtcccacgataaaaccgagtattgcaccgataagaattgttaggttctttttttggaccatagtctgtttttgaaaaaaactttgtgtagattcattatagaaaaatgtttttataaaaatagaaattgccgcaaggattaaaacatatcctaatatatattttataattccctctcgattatcatgaaaaattggcaagaaatgaattattattactgcgataattgcactaggtaaactcccaatagctagatattttactagtttaaaattgatggttttctgtttccagtgttgggatattccaaacattttagtgatagaattatatactagatccgttccaacagctacagaaggacttatgcctaatgttagaagaaatggagtcagtaatgcggccccgcctatccctgttactccaaccaatccccctatgatgaaacccatcattataatagaaatgctcattataattccccttccataccgctggcttttcatagtggttatagtttttaaagagactctatacatagtcgggtgataggtatattagttaaaaattaatttcattcttcttatatccatatgcttcaaaatcgtcagtaaatatttctgaaacaaggtttagagcttcttcatcataaaaacttcgataggttggtaatgaagggaagtgtggatttgtaatatcatcatctgcataatttcctttatgaatcatttgatgtgccctatggtgattggagtttgtaaggagtgatatatcagaagaaagtaatccatattctttctccagctgcggaattattgtattaaaattctctagttttatattttgtttgatgaccttttcttctccctcaatatattgttgtgaaaaatgttgatctaacagaatggatttagcccctatttcttttacataatataaaaattgtttaaatgaaattcctttcgattcatttttatcattataaaaatactctctaatctgttcccattgtttcgaggcgtaagggttgtcataaagtattaaaaatgagcttacagctcttttataagggttgcgcacaagttttatggtatccttacttagttccaagagttgcatttctaaatttgtgtagtaatcaactttatttttgtatatttcagattcatagtaatgaatgaacggtgcatatttcattgcttcctcatataacccaatttggaagaaaaaccaattcgccagagaagtacaaccacttctgtgactccaaaataaaattatggggaaatctttatgaaaatgtggaatacgttcgccatattcaattaatcctttaatattgttcttcatcagccaaaccccttcgttattctgatatttattgaacacttaaatacaatggtaactactcataccattgtatttaaacaccactgtaaaggtacttaagttggcatataaaatcccagtgtattaaaaacagcttacataggtgtcttaattttccaggtttatcaaaatgtaataattgcttaacaaactttaaaatatagaaatctattataaagagaattatgtatgaagatatgtatacaacgatagaggcattaatatcgctacaataatcgaaaaaaagtcttgataattcatttcaattaatggaaaaccgtagagtttctatccttaagttgatgggcatgtggcggtacccctataacattattaacttcatttaggagtaccgccccatacccatcaacctaataaaacagtatcctcctaaaataaaaaaccactaaatttatttgttacttccaaagaaagatattcatgaataatttaaaacacccgaataaaaaaaacaccagctaccataaccagtaaacctaaaatttgtataagcttaactcgattttttgaagaattaagcaatccaaattgttctactatcaagctaccaatgatttgaccgaataaggtaaagattacagtttgtccatttccaatttggtcaactagatatacatttattagaacataagacccgcctaatatccctccaagccatatccaccatggagctgattgcttaattggttctttaatatttgtgtaagaacggtccattatcccgactattataattagggtaatagtacctacaaagaatgaaacaagagctgcttgtgaggaggaataaagaacccttcctaattgaccattgatagcaatttgtatagccagtaacattccagccattataccaaccaatcgccaaatccattgatttaccatgttttttttatttgttttagaaaattgtttctcatgatttttgtcttgtatagctaaaaaggcacctgttaagactagtaacacgccggaaattcggctccatccaaatggatacggtattgaattaaaccaaccgtaattatctattaacatactcatcaaagtcattcccaaaattggcattatcgatgtttgcacactacctaatctagggaacaaaagaatattagcggttaaagcaattgccccaccaatccctcccaaccatataaaaataggttggttcaaaaataagtctagtggaatccctaatggtgaaccactaattaatattgtaatagttaagaagattactcctataacaaatgagatcattgaagctaaaaaaggagaaatcacaaattttcttaattgagaattgatggctgtttgtaaagcgaaaacagcaccaaaacttatagctaaaagtatggaaaacatagaaatttacacctcattattattaaatagaaacccagtctctcctactgaagtattctctgtctaaaaaatataaattaaaaacgacggcagtgattatgtcaaagacgtcgtcagatataatacatataataagttcagggttaattataaaaaaatatgattttttatttcaagaagctctgccgttattattttttatgatcctttatccactgtaaccagtaagaaaactcacatgctaaatgcatttgatgcgatttaataaggctattaggacaaagtgcaggaaactcaacaactagacttacttctatcccagtatcagtatctttaaattgatgtcgaactccaccgataatagttccatctttcatacgtgctacacctgttgattggtattgataagacttatctctcggtgtttgcaacctagtttcgtcaccaaaaacaataaagaattgaactggaaacggagaattaccagtagtttctataacttctaattcattttctccaaaaggtcttaatacatagtgatcaggacaagctgataaattcacttgatcattctcacgtgactgttcaagcataaaactatcaattccatttatcgcttcttctgctgtaattccatctaaataaatacttgtttttgaaaatttccgtctatcaccagataaagctgtaccaatacgcatgcccatctcgctcaatctaagtttaaatctcaacttatcgtacatttcattgtatgaatatcttaactttaattccgttagtttttttatcatgtcatttgtatcatgtattttaggctctttatgtcctaatgtattgaaaactttcttaatacgttcttttttccattttgtgagttcttctggtgaaatatttttcccctcaatataaattttcatattaattctcctttgctcttcatcaagtattattccaacgattgtttttactcttattgttagtcaatttattgaatataacctaagtatttcttttaaacatatctgaaaataaaattcccatgatgttattttaaattttttcttctttttgttcgtattttagagtggttaagattagattaatcgtctcttttttcgtatttagagttagatctatctctgaatgggcaatactactaagaccatataaaataaatccagaagttaaagataagttgtccgtatggaatactcctatttttactccatcctcaataacttgttcaatgagtggccgtaattgcataaataatttttgctcaagcaggtaatgttgttctgtatgaaatgaactggcatctttgtagggagccaatttttcaacaaatgtccaaaatatatccagagcatttttcattttttgtataacgggtaattcattcaaagtaagtatttgttgaattttttctatattttttgcgataaaatcgtttaaaagttcatcaacaaaattatctttggatttaaagtaataataaaataaacctgttgctacacctgcatgattaacaacatcctttatgctaaagcctcctataccgttttttatataaagttcaaaaccaatatccattaactcttgacgcctaatgtcaggttcttttgatattcttttcataattcatctcctatattatttttccgcgactgaatcgagttcaatcatacacgactgaacttaattcagtcaagttcgattactttaaattaaaaattctatacgcaaataaaaataagcgctgttccatttttgtaggaaagcgcaagattgaagtataggagtatttatttcttgtgatattcgttctatataatttccataatcttctttgatttaaactacttttctttttattttaagtatagattgcaactctctactctttgtaatagacaagctgactggttgtagttaacaattttccttcaggactccacaattccgcggtctggtcaaagaatccattgtagaattgaagcgcgcgagcatggcctaacacctctttatcaccatgtttagtaagcacttctgaattgatatgaaaataaacggtaagtgaaacagtgccaacaggaaccatttgtttgcgccgcacgtaaatacgcgggaaaaacgcatcacacatcgctgtaagtgataagaaatcgatgggtctccgcggttcatcctggatccattggagtgtgacagaatcggaagtattttttggatttggttgtgataatgcgagtggtgtcccttgtataatcctcatgtcgtagttgtatacccaaggtggcagcccttcagatgaaaaattcttaacttcttttgcggatggtacatttggaaaattcctttctgtagaagaccaagtttttcgccggcttgcaaaaactgcagtacccgtgataataatacctttatcttgacagagttcaatataccaatgttgtgtggatcgattcgttctagtcggtattgccttgatgctgaaattgccgtccaaaaccggcgctgtataattaatagttagagatactggatcgccttttcgttccggatgctccattacggctctaagaagagtggccgcaataataccgccaaatggcccaaccatattggcataacattcagaggtgcacccgtaataaatcccagattccccagtcaactgcgttgctgtatcaaatggatgattttgtttattataattcataatagagtcccccttgttttcaatgcaatatcagtatcattttgttgataccaaattcccacaatagttgtgatattctcctcgaagcctaattccacattttacaactgaatctaattcaatcttacttgactgaataaaattcagtcaagtaagataaaaccgttcataaatcttaaaacaatcagacacatttgcagaagggcagaattaatccaatttaaataaaaacttaacattttgtttctcaaattatgttgtttcttttaccacacaaagatttgaagtagtagacctcctttcattttcagacattttaatactttcaaagaatatcggattgaattttcagtttaatttagttgtaatgaaaatgagttgaatatttagtctgttatcgaattccttacatacaaaaagattgggttatcccaatctttttgtatgtaaacgaagcattatacaattaaactcctgattttaaattacatttgtgttatccttgcaattcgatttaaaactataatattataaagaagattgagtctagaccactcaacttctgatagtaatagctcatttgccatcagaataccctagcgaaagaatcctgctttttgtagggttcttttattgttccttcaatatgaaatgtaatatagtataagccattctgcgtgatgaacatcctctttttagcgctaaacggtgtaatcgtttctcttggaattttgacaattttatttctacaaaatgttgaaaagcctggtactgacgtactggaatgtcttccatataaatgtaatccaatccctctaccaccaactccgatgcaatatgatccatcttctcatcgtaaagaaccaatccctgtagtttttcatacaaatctggttctaaggaaattagtaacttattagtattcttccgcagtacctttttttgcgctttccaataggcttgttcttgtaaatgtgcatgcatcatgttaaatccctcactttatcaatttatttaacaatctacttctcccctaaattaccgatttactttacccattatttctcactgtatcgatagccgctagacaggatgcaatgccaagacgagcttcactatatatttttttgttgaccgtcaaataccaacatcccttttctttcaccgtaaacaagtcatcatactgtcttcctagcttctctagaatggccgttgactcttcaactggattgaaatatttaatcggcattcttataaatggtgtattgttcttgccccaatatccaccgcatttttccaatcctaaaaactcctttgcaattacatgatctaaccgttctgttacgattgataaatcatgatatgggatccaccaattagacgaactcattgctacaaactcttttgtaatcccgttatataaaattcggcatatactaatcccttcgaaatcgttttgtgttacaacaaaatcagattgttttaatggatttccatgtttatctgttgttcctatttcaaactcttcaccttttaataattgaaccgacttcatcattttaaattcccctttttataatttctattttttaaaaaccgtacataactcctgataaaacatatgtgaaaaggatcatagaaatagatactccaaagaatccatagaaccaaatttgatccgagaaattttcttcaataccaaaatagatgtttaactttttgtaattttccgaaattaatggacgtatttttttgaaggatttagttttttggtgaggttgtgttaaaatagactcaccagacgtgattttaataaagggttgtttcatgacaaccatcctttctaaaattatgtttgtatacaagaggaaggtgtttttccaggctgccaggcgcggaaacatctttctcttttatttttactccttatttttcggttcaccaaaccactcatgcattgcatcaattgatacaagccaagttttctgatctcgtttatagatgcgatttggatcacgaggtggttcaaaatatttaattaaaccacgcttaatcatactgttaatctgttcttcctttactaaagatggtttcaccttattcttcactgtttcataggggatcccccaccgtatagctgcttcctgaagaaacatgtatttatcgatttccttcatgaacaattccctttctaatgatgtaaataatttttctttttgttaatgtttaagaataaaaaggccccttaatttatggaatgttcatcactttttattttttccatgctcgtgggctgcacttacgatactcatgatgttattaatagagctttgctcgaaccctgataaccataaaattgttcgcagttcgttttttgtcaactgacgactgatgtgttcttgtaagaattccacaaacggcctatattgattcagttgccattcttccattacttcccctaaatccgattcaatccattcggcacgaccttggttattagtacctttatagttcaaattcattaacaaaacctcctcgtatgataaagttaggttttttaggaaagggatttacctataaacccgtgactgatttatgttctcttttcgtagttcaactacttatagagaaacgtgtcgcaccatgtccccattcatgacacaatgccccgactccattatcacgagttaaattaatgactttggtagaaggttcataatgtgctaatgtattgccgcttcctctcgcaccaattgccagccctaagcgtcctcctagccctatatactcaggtggaatccccaatatacgggctacatcatgtaacgcctcagatacatgctcaatatgttcttttgcatattgttcggtgcaataatgtccaaattgcattcccttcaatccaaacatagtaactacgtcttcaggtttggtagcaaattctatttctggtccttttctttggagggtatctggcagtttcctactccaagcagctgtggatttcttacgagtcgtaacctttttcgtaagtaaatcattccatgttagttcatgtgatacacgaaggtatgtagaattaatactttttgaatttgtacaaagtgatatgaatttctttcctaatattaataactccataccatctgcatcaacaaattcatcaaaatattcttctaccattcttttaaatgtgtatgtgacattcttatcttttttaaatgcataccaaccgttttgcatttccttaccgtaagaaccaacaagatctatccattgttctgaggtatgtattaactgtatatcatgccaaactcttctacatgcttgcacatacagtttccttgcagtcggtgtatctacaattggcttcttatcaatcctgcccactagcagttgctttaattttgcaacacgtggcgggacatcattttctttttcatgttcaaaagagaatggaattaatgcgtttcgatccaatgtattgagcgcttctactggagattctttttcaatttctgctaaaacttctaaagaaaatgatactaaaaatgattcttttaaggctcttagctctttcttagctcctactaatttctcaccaacatcatagctgtattgattgcgaacttgtttatctgtcctcacatcttgtactattatgttttctcttacctctaaatcgaacagttcaaataaattcatgctaaaatcctcctttataaaataaaaagacagaaattcatagtcgtttttcactacggatttctgtcattccctctgtctgtagacttccatatagttatgtaaatcactcattacgatacactcacacctgttaaagagaaaagatcctcttttgtcggatttagtgcttgtaaccagctatctacctccagaaagtttactttttttaattgttcgcctttttccgcacgcttaaccacctctaaacctccatgctgatgcacaatcattacaagatcatctttcttgaaaatacaatctacatctgcagaatttatgtggtggttacgtagaatcggtttccattttttaagtgaataaccttctacatctaaaaaaccacggatagcagtaaagcgaaaactcgtccctctaaaacatctttccaataaaaaaaggaaatcccgtacacatccattaaaatgaacatgatacaaatagatttcccctgcttgtttggctgctcgctgtgacaagtttgatggtttaatggaaaactgataacaatctcgttcccaaaatgctccttcctttgtaaccctcattcgtaatgcacgtaaatttggcataaaatcatctggatgtgcagaacaaaatatagatacttcataactcattttcatttgaatttccccctggttatatatttattatttttctacttcacaacaattgattactttacacgtagaatagataactcaaaaatatgaagaaaaagtaatactcgataaagccacggcaaatgtttttctccatgatacatgtaaagttctttcgtttcccttctataagcaaattgaacacctaagtgtgtaggaagttttgatatgtcctccatttcaacgttttgaataatctcaataacggtatgggaggactcctttaataatttctttaatggctcaagaggaatattaaataatctactacactccttagttcgctctttgttatatttaataattctggccaattcttctacagtcggatcaaataaaggatttgtaacctctacatactcagacataactttttctaatgtacaatccatcttgttaataatataaagaccccactccttaaacatatcttctaacgtacatggatagccatacacctctaaacagtacttcctttcaaatggaaaataacaatcttcttcacaatcatggcgtaaaattggtaaaaaaatcgtattgtaatactcatcagagttgatgtgtaaggctgtcattttatctgcaatatagtcttctgtatcacggaaaatgctagaattacgctctcgaattggttgagtaacttcattcctctgaaagatttttattatctcctctagtgatagtaatggtttatctagtgtaattgcatgttcgtatttcattataatgatccccttccaaagcaaaaaaaacacaaatcttgtgttttttctcacagtgttttttatttgtatacctaaatctaaatacctttttacaagtgattcctaacttgaaaacaacacaaaaagggctccttcaagtcgattaaaaatgtgcatagcaaaataagctagatatacactaatcggctcaaagaagccctttcaaaaatgaaacaagacgcaacttgcttctacaactcaaccacaacacaataaggtgtgggaataaacggaatcaattaaacattaaatatatatttatattaatcaattcgtatctaaatttcaataactttatgttttatcacaaaaatgaacttatttattttagtttttttcgaaaattatgtataataaaattaccctacacgagatattgagtcatatctcattcgtcatttaataaggcctatataaaaaataaggccttattttttattcttcctttatttactattaactaaatccaattcgtgttacaatcagaacaaacacacgttctttagaggaggattttcatgtttaaaatgttcaaaaaggacccaaaaaatgaagaaacagctattttggtaactaaagattcatttgatattttcttatttcctactagccatgaggagcaataccatttagtaatagaaaacttccacgtaggttacaatcactttttactattcgttgatagaaaaaatcatgcattgcacatttatgatgacctttatactattgttggcggaacaagtgctattaacctaattagcgaatatctaattgaaaaactgtacgaattattgcatttaaaagactataaaaatgcaaaagtactaatttacttccctgagaatcataaagattccggtttagtatcttatggttaccaatcaaaaaaggatgattttgatttcggacttgatatcagtgaaataactaaacatgaagcatatttagaactagctaaaaaaaatgcatagttcattgagctgtataaattaataaaaagacaaaagttatgtacttttgtctttttattttaacgcaatccattcgtagctttcccactcttttggtttcttatcatatttgatacgaccagtcgtacagaatgatgcaatcatccattgtatgagattcatttttgcatacggatcaacacaatcctctaattttttcaattgataacctgtactatttttctgccaaattgtatataaacgaaagtgtgttgtcgtaacaagtctagcttttgttgtaacttgccattttgcaattttcgttaaatcctctttgacttttctatcatactcttgttttatgactttataactcttatctttattaattaatccattagagaatccaaaaggcatttgatgcacctcataaacagctccttcttcatctcctaaaatatttgattctactagaaatatattttttagttttaattgttccgttaattcttttccgctccgataaaatggcttctttatcttctgcaacaagataacctgcacaattaatccgataagtaacggatacgctaatacaaacaccatatgaataaacatatttgcaataagcacccctactagtacgaatatcgtgaaataaatatatgtttctctttgatgaataattctactattcaagctaacatacctccgttttgatagatagtgaacgaaatatacaccattgcccctagtaaaatagaacaagccccaggaaagctctgtatcagctgtatttctttctttggtagttttgccccaaatatagaagcagcatgctccaattggtctttaatcgctcccacaaaccctaaaattttaattaatcgatacacactagcaatccaaaagaatagcaaatggaaagctgttaatgtaatggcagtaagcatagccgattcttctactacattgctaatatataaagctaccaccacaagcatcttggtatcaccaggtgaagagaatttaaatgtctctagcaataaaccacacgctaaggccatgactagtacaattgcaatctctttccctgttcttattccggcaaggtacgtaattcctatccctactattaagaatagtagatgccacatattctttgtttttctatatttcaaatcagtaaatacatttaggaacatgtaacttagtaataatcccacaatatacagacccattttctttactcccctcttaatttcataaaaaatgctgtgtaaaaaagggaaccacttttagagtagccccctcgtttatttttacatttattttttattccaagaatcaatatctgcattgcttgatgcttttgtgaatcttgccaggatcgtatcatagccaccttggattgccttccatacaaatgggccaatgactaatacgataattaccgccagagcgattaacataccgttttctgatgataactgtgaatcctcattttttaaccaacttttcatctttgctaacatttcatttcgtctcctttatataccgattttaagaatctattaaaattagaacttatctatttaaatctttcattacttattccaagaatttacgtctgcattgcttgatgcttttgtgaatcttgccaggatcgtatcataaccaccttggattgctttccatacaaatgggccaattactaatacgataattaccgccagagcgattaacataccgttttctgatgatagttgcgaatcctcattttttaaccaatttttcatttttgataacatgattgaatctcccttttccatttatttgagctatacgtaataaacatcattaatctaaaacttctattacttgttccaagaattcacatctgcattgtttgatgcttttgtaaatcgagctagaattgtgtcatacccgccttgaatcgctttccatacaaacggcccaatgactaatacaataattaccgccaaagcgattagcataccgttttctgatgataactgtgaatcctcatttttcaaccaattcttcatttttgttaacatgtgtaatgctcctttacctattccatttttgataacatcttctataaacttgcaaatccttgcattaaggattgaataacaatcaccattggataaatcacaatacatccaataactgcgacgttaaatttattcatttccattggtttattttgaatgagacggttatagttctcatgttttaactcacgcatcattttaatctgtgcatccataatacgaagactctgtaccttgtccgttttttgcgcttgttgcaatgcaatcgtaaaggtatttacttctggactatttaaagcagcagcaaagtttcgaaatggttgatccgagccagcatacatttctaattccgcagtaagtgtagatacatacggacgaaggtgtctcccggcatatatctctgccttttttactgcttctaatgttgtatgtgtttttaacagctgcagcataggtattagatactctggtaattcgaacttcctagcttctatcgcctgcttgattcttccctttgataactaaaaattcttttgtttttcagttgacatactaccgcaggtcttatatactgcatgtttctattatacgataaaatagaaaaaaggcagaaaacgaagctcgtcttctgcctttttgtaatattattatttcgtttgttgtttattaatagacataatgaacagtccaacaatcccgcctactaatggaagcataatctctcctgctaaattaaagtaggagcttaagaataaaccatttacatcgattacccagccagtaacatacaataacatcatatatagtacgaaataaaactcgcgatttgaaatcgtttcatgttgtgcagttttcataatggacaccatccttttcttttataatggaatataaactgtcacattttgttcacatttcaattgtaaaactttccatcataaaagtctagtagtatgtgtcgaattttgaacggaaataaagcgttatcattatatcttataagtacgtaataagagatgtatattcacgaatgtagtatagtataaacatagaatgatagtgaagagaggggcaaagacaatgacagtttatgatttttcagctaaaacaattaccggtgaagaaaaatcgttaaaagattacgaaggaaaagcacttcttattgtaaatgtagctagtaaatgtggtttcacaccgcaatataaaggattacaagaggtgtatgataaatataaagaccaaggacttgaaatactcggattcccttgtaaccaattcggaggacaagaaccaggtacagaagcggatattactagtttttgtgaattaaactacggtgtaaacttcccaatgtttgcaaaggttgatgtgaaaggtgataaggctcatcctttatatacatacatgacagaacaagcaccaggtttactcggtatgaaagcagtgaaatggaattttacgaagtttttaatcggaaaagacgggaaagtagtagggcgttttgcgccgcagacgaagccggtagatttagaggttgagattgagaaggtacttggagaataattaggagtttcactttattaaaaaacgtctcaaagaacaatgtagttctttgagacgttttctttaaactcacattttcaagattaaattactgtatcaaagtcatctgatttaggtagagaagctgcttttttcataagcacttcccataagtgtacggttttcttccattctgctgcaacctgcccctgtttatacatagcattctcataactggcagtaagttgttgcatatcggccgagttgtaaagtgtatcgatatggagagcgtattctcggaatgtttgactttcaccccgtggcatgccaattctcgcaaattgttttaaaagtgcaccgtaagctttttgataaacagcatcatcttttcggtatttatagaaatgaataataagaaatgtcctccatatcattctagtggtgaagagaatgtatcccataatactaattagtatcgtagagaggaatacgtaccaccaagaaaaactagtttgagaatttgtgacctttttagtagaagcttcttctgtattttctattaaacttttaagttttgcttcattatttcgttgttgtatttgcgtgttattagaattatttgcttcgctattttgtgaaataggagcaggcgtattatttataaaattatagggattagtaaatccttttgttggttcgaatggaatccatccgtatcctgggaaatatacttcggcccaagagtgtgcgttatcgttcgtgattgtataaacattctcaccttctgcagaggcaagtgtattgtcaagagttccttctgtatagccttttacccagcgagcaggaatcccggcagaacgaagtagtacaatcatagacgtcgaaaaattattacagtagccgctttttgtatcgaaaaggaattgatctacataatcttggcttttggcagggaataagacattcgttgattcgtatgtaaaagagttgtctgtaaagtaattttcaatagctaatactttatcatatcggttgtctttatcatttgtaagattgacagccaagtcttttacgcgctgtggtaatgacttgggaagttgtgtgtactttgtcataaaataaggatttgtttcttgaccttcatttgtttttacagctttcaagttttctatggaaaactcagggatctcatatgttactttatacgaatgtaaagtagtagaagagtctccattcattgtataaattttttctgaaaacgggtcaacactgtatgatacatcagaagcagcctcaactgatactaatcctgctggataggtaagatgagggtaacttttttgcatggtaattgttgcctcagtcgttttcatttttgtattttgttcgtaccagcttacgacgtcgtttttatttttaaaagaaatctttttcggattttcagaaatttcccagccttttcctgtataaaaatcttttgtttctactctccaatattgtttgttttgcgttcgtgctgtgaaaacaattgtaggatccgccttaaaaggaccgcctaatcgcgagtcatctaaaccatacccaattgtagaaactttttgctctttacttgcttcagatgtgttgaattttaaaaaatccattgggtttggccattgagggccaaattttggagcaaagtatgcaatggttgctaataatacgataaatattgtaagtggtctaagtaattttgagatttctctagcataattttgtaagtgttcacgttcttttattcgttctacttgaagaagactaagcataaaaaagccgatgacaacagtacgaataatagcgtagtttgcattgtataaatgtaagttatgaaaagttgcgatataaataatagtcaatacaaggaatagaaacccacgttttttatgaataatccaaaatgaagtgaaagaactcaaaaaccaaaatgagagaaaaaataaaaccgtcggaaaaactggagaaatatctagtaaattcccttggaaaaacagggaggaatttcgaaacatattagaaaagaatgttgttagccaagatggatttataaaagcatttttataatatagggaatgaatgataaataagactgtgacaatttttataggaatctgccacctcgtttgaaaaaaagagagagcgaagcaaattcctataaatgttacgaaaatatctaatctacctacatttgtaatgcctataagaggtcttagccattctagtaaaagaagaaatacacatgcatgcatgaagaatctgttcgtatcccacttgtattttgcttgtaatatcatcatttgctcacctcaaaaaacacgtttgtataccggttttcataaaccgtgtttacaaatatttgtcgtttttttagagtttctagtatactgagttctcggtgtgaaagttgattcgctttttctttcacgacaaaaaccatacattttctatttcttatagcagcacaatcagccgccttttgaatatcgggagaaagattactggtcacgagtataaccgtgacgggctcataaatttttcttagttccatgtctacactctgggagagcggaaatacactgtctgcttgtacttttgctaaatgacaaaggatttgttgtaactgcgtatctccattgtctaaagggaaaatagtttgttcttttccgatagacacgaatgatgctggtgaattttgtttcaagacagcccttacaatagaggcagtaaatgtgacgactgattcgaatagaggagactcgtttctgtctatgaatatcatgatattatggctgcgctgttgttcaaactcttttgtcataatattgtttgttcgtgcagttgctttccaatcaatccatgaaaagcgatcaccaggtttatagtctctgacaccgacagagattgtagagtcttttgctgaatttatatttgctgaaagcgctccttgttcgaaatgattttccaattgtcgatacgctatatctacatactggggatagactaaaaatgtatctggaactgaaaaagttgcttctttctctatcatgccgaataaatcgccggttttgacacgtacgcttgaaaaagtgtgctcgcctctagggattgtgtcaataacatattgaaacgaaatatttcgttccaatcctgggaagagtactaccttattcatctttatttgtttacaacttataaattgtggtggcagttcatcttctataactaaataaagtaagggaaaaggaaattttctttttattgtaatcgtgcttacaaattgttctcctactacatatccattctggtttgttattcgctttacttcagcgtcccgtaaagcgtagaaggggagtagtagcgaataaagagcaatgggaattatgctgtaaaataaaaaccaactgacaaaccctccttgaaacatagcgtacacaaatgttaagactaggcataaagggagtagcaataacttcataacgtgatatagtgctcgcagcattcgtttcatcaagggttcatcgccctttgagtaggcacggtagttcgtgcaacgatttttgcgataacttgttcgccagttattccttcaaattttgcttccatttttataatgagtctatgtgctaaaacgtaaggggctaaaagtttaacatcgtctggaataacataattcctgccatggataaatgcataagcttgtgaagctttcattaaagcaattgagccacgtggacttgcacctagctgtatagaactgtacgtacgagtctgattaacaagctttacaatgtaatgcttaattgctttgtccatacttactacccgtacgctttgttgtaaataaagtaattcttctattgtagtaatggtctgtaattgagagagtggatttgttttttccatccggtttaaaatttcaaattcttcctctggtgtaggatatcccatttttagtttcaataagaaacgatcgagttgagcttctggtagagaatatgttccttcatattcgaccggattttgtgtagccatgacaaagaacggctttggtaaaggccttgtaatgccatctattgtaatattgccttcttccatacattcaagtaaagcagattgtgtctttggagatgtacgattaatttcatcagcaagtacaaaattacccataattggtccaggcttgaactcaaattggagctctttcggattataaatagaaactcctgttacatctgacggcaataaatcaggtgtaaattgaattcgcttataatcagcatcaatggatttagaaagagcacgtactagcattgttttcccgacaccaggaacatcttctaataggacatgaccttcagctaagagagctgtcaaaactaagatggtttcttttcgttttccgaccattattttttcaatattattgattattttttctacagtgggatgtaatgaatcaagctggggcatcgtaatcctcctaatgttattatcgttttctaatctatttagtggacatatttctaattctatttgtagatagtaaaacttccacctttaattctgagaatattcagattatttattttgattatatctagtataattgtttccgtaactaagggcaatacagtaaataatgatttgtagttttatgtaaaatcagactcgatataaaataataacattgggaaaaatttttttacatacaatttatactcttttccttatagcagttttgaaataatatcaaaactctttttcttttgcaaaatagtcgatacctcaaaataccattctcctaataatcacgattaaccataaccttcacaacggaacaaaaggttttctcacaaacttattctctaataaatttttgacaatctcttgaactgtgcgaaatgtcacatctgtattttacaacctctcttatagtaagggtatgtaagagagacgtattaaagacctgcggtagtatgtcaactgaaaaacaaaagaatttttagttatcaaaggattctcccgattggactttcaccaactagataatgtgtccttatctggacacgccgatttgccaacgcaaagaataccagtcatgtacctgtcccatagggacaatatctgtaggggtgtttgtcatatatacattgataccgctgagtcgtttactacgaggagaatacttcattcctttctttttttctcttacagcttgatcttgtaatcgtttttgttgctgttgttttgttaatcgatgaacaattacacgagctggcactttatcaatcattcctacataagcatcagctatttcacatgtttgtcctggttgaagggagttcattaacgtctccatatctatctgtatatactctgtacctttcttaattcttccgtcttggaaataatcagggttaggatttttttgataaatacgtgtattcaacttgatacgagagatatagtaggcctctttatcttgtatatattgaaggtcttttaaatgaaaataacctaaatctcggatacataaatcatttgctgtcacagttggggcacacagagagccgtaagtgcgatcatgttgtttacctggacctgtatgaatatgtaggaactgtccacttaacaaatcatactcaagttgaatttttatcccagcagtatggctgcaccctcctgcacctggataaacagatgaaaatacatccgggagttgaaatgcagttgaatctaaaatacgaatacgcttgaaaacagaagtgtatggagaagaaatcggcatagatgcggccaattttttgcttagtagttcggctagtaggtgttgtaaaagttggacagcagccttattaaatcgttgattcagtccctcaggactgataagtacttctgttgatgcttctaaacagctagataactgagttaaagaagtcatagctacattttggttcacccatacacataaagctactaaatcttttgcttgatacttactggttcgttgtacaaaaccaacatctctagcaagatctcgtaaggtatttggagataaaaaactttgaatctcttgggcaaatagttgtaattcgtcagacacagaaacagacataaaaacgccatcctttcctatgattctacagaaagaatagcgtattttttcattttagagaaattttatattgtcggcttaatagtaacgtgatgctacctcatcgccatcaacttaagaaaacaaatcaaccccaaaacgaaaattttatatctttgcagatatatttgaggtttaagctcatttttctattttgtgggttaataaattacttaacttgatggcgatgtgacgttctccctactaaatctcttttaaccttattttgagtctgcacaaagtattaaatccattcaacttaagtagatataataatattgataaactttaagttaaaagagacacccgctaatttaagggttttcaaaaatttagttagtttaatgttgcttctattagtaaatattctctttctttactatctacttgctgttcaattgaattgatcttataagaagatccatgagctattaacaattcactttcaggtaatttcgctagatttcctaagtatgctgcatgttttccctttggaattgttaagtgaataagaatcggcagtttaggaaaatttcctgttgtctggttaactaatgaggtgctcatatatgctttttccgattgttctgtatgattaaacgcttctttaaattttttcaccttttttacctttttcaagaaatgcatcttctgagactcgtctataaacatttactgcttcgggagttgttacttttgcaagcgctcgatctatgtactgaatttctttatcaaactctttatttgcaggttttcgatcatttctaaggtgtgtattaatcttcgtataatcattacctgtatatctttttattgcttctctttcattttttctttctagtttactttctttactttctttgtcatctgtatcatcttttagcaaatcatctatccacttcttataatgtttcgctccccattctttggctgcatctttatttttcttcgtatcatacccgaaatctataggttgtgtagcattgatcatattaaattggtgtattttccctttttccatttgaataggttgatttgtaatgctattactcttttccgtcatagcaaatgtagacgtaacaccaccgaatacagataaacctaaagatagggtgatagctgtagctaagctttgttttttcattttaacactccttaaaatttatttacattacaaacgtactccttttttgtaaatttcggaatgttattaaatgtttttcaatagacgtctgaccttatatgtttttataacatagggataatttatatataatgattgaagactgaagtaatcgatagctccaaaatttaacttaaataataaggaatattcacgagaattaaagtcattattcgttaatttttttgatatttatacaaaataattacatattgattgggagtgatggtagatatacataatttctcgaaactaattaaaggaataattttatgtatatgaaaaactattagtagataataatttctatatatgattcttaggtacagagaacctaagatgaaaaaataatagaacacaaaaaaagatgttcaacattagtctaattttatatttttcactatttttatagaggaatcttaacaagggaatatttccatgaactatccttgaaataaaatggatacagcactaaatattaaataaaaaaatacttataccttataggggtcaccatacattgaactgcaccccaaaatgaaaattttctttctctacagttagtaactttgagaagtcagctctttttttcgttttggaggtgattacttttcttaagttgatggatgtgtggtgctaccccttcagtatattcttttgggtcaccattatctccacatgctacaggtactgtaaatgagaaagctcttactatcattaacgtacttgttatgtacaaatttattcctcattttacccctaaaaaataggacatggtctgtatttcatctccatttagatagaaggaagaccgttttttttgttttggggtattttttaaacttaatagcaatacgttagtaccttcttgtagcacaagggttgtaataactaacagaaaattaccaatcattagaaaattttatatcaatttactttatattccatttatgtaaaaataattgtgagtacattttttaaaactttcccctaataaagttttgaaaaagttgtctcaacattccctatgttgtaattatgccaaggaaagagagcctatatggttctcttttcttataaaattgaatttttcaacttcatatttaagtagtataagacactattaaggataccattgctgtattgaacaacaagggtagataaaaccaatagtattgttttcgcctttttcataaatgattattagaaatactatataagaaaagggataaataagtatatttatccagaaaataaaaaagtagccaacaaaagttaattgccctgtgaataagaagaacatcaatagaagatgaaagtttgcccgaattatgtctaagcttacaatttacttttttaatattgtgagacttcttatataaaaacaagccataaaataacttgatttgattttattacacttgattatatttttatttagtgtatcattaaattatatggttaaattttctataaatggaaggtggtatataatgttgactgaattacaaaaaaattttttctcacggttacagatacctccgaaagaagaggtaagatttgaaaatttacatgaaattcttcagcaaatggcatatgtaataccttatgaaaatttagacgtgatggacaaaaatatccgaagaattactagaatgaacgttcaagaaaaattactattaaatcagcgcggagggctatgttacgagcttaatacactattatattattttttacatgattgtggatttgatgtttatcgcatatctggtacagtttacgatttaggtggtgataagtggaaacctgacgatggacatgtgattattattttaaattataataatcagaaatatattatagatgggggacttgcctcacatcttccattacgcccagttccatttagcggtgaagtaatttcatctcaaacaggaaaatatcgtattcgtaaacaaaatacggagaaaggaactcacctattagaaatgaaaaaaggagataatggggagagtgcccaattccttaattctgaacctactaatgcatggtgcactgggtttgcgttttcattagatgaaatagatacaaacaaagtaaatgctatacaaaatattattgtagagcaccccgaatcaccttttaataaaggatacattatctgtaaattaattgaagatggacatatttcacttactaaaaaaagttttacagaaacacgaaaatgtcaaaaaagtaaacgaactataaatgaaaaagaatatcaacagatccttaaagaagtattcaatatttctctaaataaataccctgataaaattttagaaagaggctagctaacactaactcttataaaatttctttgtcgtttaaaatagatttgtttaaataaaattacatttttatacctttatataatttcaattgagatagttagtatactttatctacaatatattttaagagtgaaaaagcatgattttttatgcaatattagaaaaagcactcgaaagagtgctttttgttcataaaatataaattaatatagctataaaagtaaatgatttgtattttatttttaatagaataatttcaaataattatgtattttaaggagtgttaatcttgagaagaacaacagaatacatattagggcttaccggtggaattatgggtatcttattttccatttatgctatgtttattgataatctaagtaagactcttaaagtagaaggtataaatgtaataataggcttaaattggctccctattacattatctgttattggaattattggttgtttaattgttacatttaaagctaaaattggtgggattttaatgattatatccgctattggtggttttatttgtatctcattttttaatttattaccaggtactttattattaattagtggattaatgagtctttttcgtaaagaaaagccaaatttaactgtaatatagaataatttatggataaaaaaacaactcaaactgtaaagtcaattcaatcacaaacagcattaaatgtggaaatattgaatcaatctaacaaaatataataaaaaatagaagctttatcgaaattaatttcaaaatttattattaagaaaaaaggaaaagagaattaataaatatcaaatatgatgatatttattaataaaaaagactagtgttgatcttacccctgtcaagtaaacggtatgaaaaagaataaacagccatcgagattcgatattctatcagagctcgatggttgagtcgtttttggaaccgtttatagttataaaagtaaatatactctttaattgcttgtattaaatcttcttctgttttaaaatgattcaaatacaacatctccgatttaaaatgggagaaaaatgactcgatgcaagcgttattatagcagtttcctttgcgagtgtggctaccaatgatacctaaatcggaaagtcgtttgttgtaggcatgagatgtgtactggaatccctgatctgaatggagaatggttccacacatatctttttttgtgccaacatttcaatcgtatctaatacaagttcattatcattgcgccttgataatactcgttgtgccgttgttaattggtctaacatgttacgatagaacttagggtaattggctttctcatcctcagaactaacgtataatccatccatcgcaaagtctagattttgtacatgcttaaacaagcgaaaatgtacatgtttatcttgacatttacagcctacgaatactttgcttgcaaacgttgttttatcaggctttttgttatattttcacctcattgaaatgcccagtaacggtattgtaaaataccgtctataattgataacctatcgtaatgtagttgaactataattaacctctttgttacgctaaaaggaattttcagtaaaaagagatgatgtgatattaaaaatttgtttcttattttttattcgtattgcaagcggttggattgttgtgcaaaacttcctattaaatccactcaccgttccccccactagatcaaacaggacagataattgcatatatcaaactttatacttaatataaaagacttcatctaatatacgcctataaggaacatgccatctgaataagcaaaataatatgcacatagtttatacagcacacttaaattcatttgagtgtgttttttgtctactttatgaacaaagcttttcttttaacactattatggaataattatacttttttacgttgacaatagtgttgaaggagaatatactaagcatgtaagttgattgtgaatagtttcacaaataatgtgaatttcttcacatataatagataggagttgtcattattatgagtacttggacacaaatttatgacccattaaacaatatttggttatctgcactaatcgcagcacttccaatcttttgtttcatcatttgtttaatgggattcaaaatgaaaagttacatggctggtctttatagtgtaattgtcgctattatccttgcaatatttgtttataaaatgccagcaacagtagctgtagcatctgccggattcggtgttttatctggattttatccaatttgtactatcgttatcgccgcaattttcctttacaaattaactgttaaaacagagcaattcaatattattcgcgatagtatttcaagcattacaaatgatcaacgtttacaagtattattaatcgcttattctttcggtgctttcttagaaggcgcagctggtctaggagttccagttgctattacagctgcactacttgtaggtatgggctttaatccattaaaagcagcaggtatttgtttagtagctaatattgctggtggtgctatgggtgctatgggtattccagttacagtaccagcacaattaactcaacttgacgcattaactattggtcgtcaaactgttcttattttacctttcattagtgttatcttacctttcttacttgtttcaatggtcgatggaattaaaggtattaaagaaacttggcaaggtattcttgtaagtggtgtttctttcgctattactcaattcgctgtaacttacttcttaggcgcagaacttactaatattttcgcagccgttgtaagtatgatctctcttgcattattcttacgtgtttggcaaccaaaatcttctactaaagaagaaaaacaagaaactaaagtatcacatacattcaatcaaattttatatgcttggtctccattcgtattcttaactgcatttgtaacaatctttaacttaaaaccgattaaagctttatttgctccagatggtgcgttagcaaacttagtatttaacattcagttccctggtcttcataatgctgttatgaaaactacaccaattacaaaagctgatacacctttcgcagctgttttcaaatttgatgtattctcttctacaactactgcgattgtactagcaattatcgtttcacttatcgtttaccgcgtaaaaggtaaaatggttaaagaattaatgattgaaacaatgaaagaattaaaagctccagtatatacaatttgtagcgttatcgcgttagcttacgtagagaactactctggtatgtcatctacacttggacttgcattctcttctactggtaatgcattcccaattctttctccaatcttaggatggattggcgtattcattacaggttcagtagtttcaagtggttctttattcgcaccacttcaagcagtaacagcagaccagttaaacatcgtcccttctacactcgttgccttaaacgtagtaggtggtacaatggcaaaaatggtttcaccacaatctgtagcagttgcttgtgccgcagttggactagttggtaaagaatctgctctatttaaaacagcaatgaaatacagtttaatcttcttagctgttattagcttacttcaattaaacgctgtatttaatatcttttaaaaataaaacaccgatccaaatggatcggtgtttttcacattacatttctttattttttaataaagaagctccagcaatttcagggtgagtcatttcgaatggatctaaaataatatccaattcctcttctgtcagtacaccatgctctaaacataactccctaacagattttcctgtttcaatcgcttcacgtgcaatacgagatgctgcttcataaccaatatgaggattaactgctgtaataattccaacacttttctcaacatattgcttcagcaattcttcatttgctgtaattccttcaatacaatattcacgaaatacacggaatccattattcataatactaatagattgaattaaattaaatacaagcacaggctccattacgtttaactctaattgtcccgcttctgatgctaggcaaattgtatgatcatttccaattacttggaatgcgacttggttaatcacttctgccataactggatttactttacctggcataatcgatgaacctggctgacgtgctggcaattgaatttcagccaacccaacacgtggcccagacgccataatacgaagatcgtttgcaattttagacatgttcatcatacatactttaagtgctgcagatacttctgtgtatgcatctgtattttgcgttgcatcaactaaatgctctgcaccaacaagtgggaacccactaaacgttcttaaatgttttaccacctgttcaatatacgtaggatttgcatttaatcctgtaccaacagctgtcgctcccatattcacttcatataaatgttgacgggactgtttaattctttttatatcgcgcgcaagcactcggctatacgcttcaaattcttgtccaaggcgaattggaactgcatcttgtaaatgtgtgcgtcccattttaataacgtgatcaaactcttttgcttttttaagaaaagcagaatgaagttcctccattgtaataagaagcttttctaacatcataagagttgcaatatgaattcctgtcggaaacgcatcgttcgttgattgggccatgttcacatgagtgtttgggctaattttcgcatacgcccctttttcatatcccatacgttctaacgctctattcgcaattacttcatttgtattcatattaatagaagttccggctccgccttgaatagggtctacgataaattgatcatgaaactttccatcaacaatttcttgcgctgcttctgcaatttcatgtccaatgtctttagctaagtaaccagtatctatattcgcaagcgccgccgcttttttcacaattgccattgctgtaatgagtgatggatgaatgcgatatcctgtaattgggaagttttctacggcacgtaatgtttgtacaccataataagctgcacttggtacttctttttcacctaaaaaatctttttctatacgtatatccttcgttgctatcatttttatcacctatactttttcattctaaatccttatccaaaaaatccgccctctaaaaacacgagtatcattcagaagaatttttcagtatccaccttcactatatagtaccttttttgaaagcgcaaacatttatttttctgtatatcctttttattaaagtttatagaaaatcattctcctactttccttatttccactcgtttaatttgatgcatatccttttcaaggactttaaaataaaaaccgtgtttctcaataatatctccttcagcaacgatttgtttttgtaccataatccagccaccaattgtatctacatcatcagcaattaaatgtatgccaagcaaatcatttacttcactaataagcacttttccctctacgattttatagccttcacttacatgctctataggtggattctcatcttcatcgtattcatctcgaatttctccaacaatttcttctaaaatatcttctagtgtaacaatccctgctgtaccaccatattcatcatacaatacagctaatggaatgtgttttctttgcatttgtaatagtaaatcatgaattggaatattttctagcacttcaataactggccttgtatatggcataatcgagcactcctcgtcccgactaccatccatataacgaataaataaatcttttacattaaccatcccaataatttcatctttatcttcaccaaatacaggatatctcgtgtacttttcttgcgcgattactttaatatgtgtttcaaatggttcgtcctcatataagcctacaacttccgtacgaggtaccataatttcttttgctactctattatcaaattcaaaaatattatttacatatttaaattccctttggttaatctctccgctctcatagctctcagataagattaaccttaattcttcttctgaatgagctacttcatgttcagaagctggatttaatccaaatagaccagttacaaccctcgctgaaccattcaaagcccaaataaacggatacataactcggtaaaaataaataagtggcttcgataacaataagctaacttgttctgctttttgtatagcaaatgtctttggagcaagttccccaatgacaacatgtaaaaatgtaattactgcaaaggcaataataaatgaaactgtactggaaattgcaggtgagaattgcaattttaaaaacaacggctcgagtaaatgtttaatggttggttcccctaaccacccgagccctaaagcagtaattgtaatacctagctgacaggccgataaatattcatctaaatttgtagttacctttttagcggccagtgcacctcgtcttttttcgctaacgagttgatcaatacgactgctacgtaccttaataattgcaaattcaacagccacaaaaaatgctgttaacccaataagaatgactaccatcaataattttaaaatatccacatatgctctttagctttcttagctaaagttacacctccttttaaaaagaagtttcactttagtttcttcaattattggaaagcaactctatataaaatccaccaattttcaaacctcatacaattctaaaggtaaaccatcagggtcttggaaaaagacgaatttcttccccgttatttcatcaatacggatcggttcggtctcaacaccacattgatttaaatgcttcacagcttcttctatatttgtaacagcaaatgctaaatgtctaagaccggctgcttctggaaaacttttgcgctcaggcggatttggaaatgaaaataattcgatttgatactcttctcctacacataaatctaatttataagaatctcgttcctttctatatacttcattcatttctttaaaccctaatattctagtataaaaatcctttgacgtctcataattcgaacaaataattgcaacgtgatgcactctacatatattcatactctctctattcctttctttaccaaagatgcatattctcccttgaaatgaaaaacatatatagcagaatatctcttttagggggcttaccacatgcccatcaacttaaggatagaaactctacggttttccattaattgaaatgaaatgatggcagagaggtcacacccgttcccataccgaacacggaagttaagctctctagcgccgatggtagttgggaccttgtccctgtgagagtaggacgtcgccaagcaactttaagacgagtcagaatgactcgtcttttttgtgttttataaaaataagaatggctggtaaatctcagtttattaaaatttcactttattgttcacatcaacaagttcaaaacgctcacagacgagtaacatatcttcagagaaattaagaccaagctcatttagttcctttgtaaaaaaacgaacatgggtgtctctccagtaattataagtacgatctccttcgccttcagcgatagcgaattcttcgcttacttcattcattggtgttacagttacttctattgtcttaataatagctacaggttcatcattactattgagtataatactataatcaatagtagtcggtagtgattcatgttctaattcataaaaaatgtgaccggagcatgtagcggttttaataccgtcaattactagttgtgcaagataattaggggcatccccaaattgccaagctgtaacagattctggttttttgttgtttccccaataagtatcccaatatgtctgtgctaattgattcatttttatcgttacctcactctaattcatatttagtctctttataattcctaggaaatttacttacttacttatttagtatgtctttgtactcatttaaaagttgtagcggtgtgttgcaaattaaaaagatactatgtggagtgaatatagtttgtaaatatgttctgtacatatatgggatctttaattttccaattgcattttatgataaaggatgtagttacttaaagaacgttcagattatgaatggtagtttattatcactatgccatattgaagtgagtaatactagagttaaaatagatgaaaaaactgatattctaaattgaatatcagtttaataatatgtgacttatatgaatctatagcaatacgaaaagcgtaaataagatagccaacaaaatacgatagtacgcaaaaggttttaaacctatcttctctaaaagctttagaaaagttactaccgctagcatcgctactataaaagaggtaatgaatcctaccgcaaacatagggatgtcatcgacacttaaatacttccaactttttagtaagtctaagcctgtagccccaatcattacaggaagagctattagaaaagagaattcagatgcagtcttataatttacttttgctaatagacctccagagatagtagagccagctctagagaagccagggtatactgctaagcactgaaataatccgattgttaaagcttggcggtatgttaaatcgtccagtgaataggctgctgcctccttcttttttacttctgcaaagagcataagaattgcacctgctacaagtccaatcacaacagtgtatggctggaataagtatgttttaataatatcatgtagtagcaaaccagcaaccactgccggaaatacgccaagaaatacatggaacgcgttgaattttttttctttctgtagaagtggcttaatattacataaagaaacgagacgtttatgatataaaattgcaatggctaaaattgcgcctagctgaataacaatttcaaacgttttcgctctttctccctcaaagcctaataaatgcccgactaatataagatggccagtagaggatataggtaaaaattcagctaatccttctacaataccgagtatgaaggcaataatgatatcgctcatagtttcactcctacaaattaatgaatgtctacttttttaaaatagaatagtgttgcaataaatccggaaattgtcgttactgcaatgatgatataagaatactctggtggatatgtcggttgtaattcgttatttgcgatatctagagtagcggtccacggaaataaatctttatgcttggagtttacgagcataagattagtcattgtaataatgactgttaatataatgggcggtacatagctcttcattacaagagttagtagcacaataggtgaagacaatagaaagagaagtccaccacatattaaaaattctaggaaagaacctaaaagtaaagaaatgttaaagccagggaagttccccaatagccctaatattaaagtaagtgcccaagcgactaaagttagcatcataatccaaagaaagagaatgatgaatttacttataataaagctaatgcgcgacacggggatagttagtaaatttttcagtgtatcttctgcatattcgcgggtaagcaaatatgcaaccactactccatataaggggaatcctataactaaagtagtatataagttaacgtcagtgaataattgatggaaccaaatagttggagtaggctgttttgtttttatatgtatataagaggctactacaactaagaaaggtgcgacaccagcaccaataatgctaattaaaaacatattagagcgttttagttttaagagttctgtatagagtagattaaccaattgttccacctccaactagtttggtgaaataatcttctagtctatcttcgcttatcatcatttttaatacttcaataccattaagaacaaacgttctgtttatgtatccttgttgtccaaaatgagagtaaatacgaatatttccttcatcatgtacttcataatcaaaaatttgaagatgattttctaataacatcacagctttatcgtcattattcacttgaaactctatgtacttacggtttgctttgcgcagcgtatcaagagaaacttcttctagtaactttccttcatgaataattccgatacgatcgaccaactgttctatctcggctaatatgtgactagaaatgagtattgttatatttctttcttgagctaaagaatgaataagttttcgcatttctttaataccaatagggtctagtccgttagttggttcatctaatatgagtagctcaggataatggagaagagcgcgtgcaattcctaagcgttgcttcattcctaaagaatactttcctactaacttttttgtctcatgctgcaagcctactatttctaatgcttcttcgatagcattctttttgtgaaccccaattatctttgcattaattagtaggttttcttttgcagttaagttttcataaaatcctggaacttcaactatagaaccaattctgcttaaaatatctttttgattttggaataagttctctccgaatatttcaatcgttccacttgtaggttttataagactaagcagcatacgaatggttgttgttttaccagcaccgttgcggcctatgaagccataaatctctccttgttgaacattaatatttaaattatctactgatttttgattgccatatactttagtaaggttagtcgtttttataattgtatttataggagacacctgctttctataagttcttacttacatcataaaaaggaaggcttaactgcatattaatcatttcttaactatttcttaaaagtattgtgttttggaatagaaaagccaaaagtagttcgtttccatggagtactttcaacccatatatgcccaccatttttttcaacgagtgctttagaaatagagagtccgagaccgctaccaccaaatgaagagtttcttgattgttcgcttcggtacattcgctcaaatatgttttgtaaatcatgttttggaataccagggccttgatcccaaatatgaagtttgtattctgcatcagcttctagcagttcgactcctattgttttcccatcctttccgtaataaattgcatttttcattaaattaccgataatccgcataatgcttagatgatctgcgatgataggacaagtagaatctggtatgagaatttgcagttcgatgttatgttttgagagctcaggtaaaaattcaatcaaaacttctctagtaacttcagaaaagtcgagttcttcttcttttagtggaaattcattagcgtctagcttcgccatattgaatatttcatcaactaggtgctttaagttatttgatttcatatagagtattttaagatattcttgtttttctatttcagaagcagcaactccgtctttcaaagcatctatatatccgattatggaggtgagtggtgttcgtatatcgtgggagatactagacaaaagttgttttctggattcctcggatcttttggcttcaatctgaacctgctctaatttagctattagctcgtttattgaaaaaacgatattatgtaatgagtggtcattgcttgtgaataatctcgtttgtaagtttccttttagtacacgacttaatttagtatccattgctttacgatgttgaatgaattgtattcttgaaaagaagagataaattgtaattaagataaggataataaataaagacatttttaatcttggacccatttgtatgtttaaaatcccgcaaatgataagttgtaatgaaataaggaagagggttttatcagtcttcaagcttttcacctacaaacttataaccaattccccatatagtctgaatgaattttggattggaagggtcaatttctattttctttctaagttttcgaatatgtaccataacggtattgtcatcttctatataattatcgtcccacacatttcggaagagctgtgtttttgtaaatacttgccctgggtttgaagtaaagaattttaacagttccaattcttttccggttaagctaatttcttctttgtttgtatgaactgtgtatgtatttaaattgatagttagtcctttaaaagataaagtggttttttcttgagcagtattgttacttccgagaactaaaaaacgccgcataagagcttttactcgtgcaattacttcgtgaatgctgaaaggtttcgtaatataatcatcagcaccaatgcttaagcctaaaattttatcaacttcgtgatctttagctgtgagcattaatataggtacgttagttttatctctaagttttttacatacctcgattccatctattttgggcatcataagatctaatataacgaggttatatttattttgattaaataaatgcaaggcttcttcgccgttgattgcagtgtctaccatgtataattctcgttctaaatatatttttaataaatttcggatttctttatcgtcgtctgctataaggatacgtatatctttcatatcttcacctgtttctaatagagttttattgatagtacaacaactctctaattatatactagtatttgttaaaataaggttgctagttttgttggaggaaaacgtccacacaagttaagtctagagttcaaattaacttgaatatatttggaaaaataaatcaaagagaagcagaagccgtgctccgataatgaaatcctatagagacgtatctagctaaaagagcataaaaatattaaattgaagttctttataaaaaggtgttgacgattatactttagaggtgtaatatagaacaagtcgccgatgacaataacgtcgcaagcgacaaacgaaataaaaaacttagttgacattgaaagatgaaaatgttaacataaggaagtcgcaaatgagcgaccaagtagttctttgaaaactgaacgaaacaaacaacgtgaaacgtcaatttttattttagatgctagacaaactaaaaaacaccccctatttatataaaaaactccccttgacttctcatagttggtctttcaatagtgttcatattattctatgttttaataaaaaaatggcttgtttattaacctactattttatctttatatgatagagtgtcttctactcgatatagaattcatacaaactatgctaatttttaagagaaagtggagagaactactactagttatggtatttttcaataaacacttgttgaagaaaatgttctaattacaaataatatcttattttcgagtacgctttttaaatgtatatttcacaatgaaaaatgggaaatccacaaataaagtctatgtatatgtgagttaatgggaaaatctagtgtgtttttaaggggcgtcttatttaaaagaaaaaaggtttgttttagaaagtggtgtctaaacattaaatggagtaggactaaattcacggccgctcattaaaaagcttttaattaggagaagtctgtttttataatgaataatgaaaagaaagtttggtacaattgtttgtttttttctttttatgtgtttgcctcgtacccttttaagctagtggacatactttactaatagaaaggattagggggtgaggtattgggttctcgatttaataattgtaaaaagaagtgtacatgtaaacaagatgattgttgggaagtattcgaagagtgtaaaaaagaacagcatgagaaatgtgataattcttgtgtacaaggaattagagatgaacttaagaaattaattaatcgaacagttcaaattaatacagagggacgtacttatgtaggtactgtttcgtctgtaagttgtgatgtagttaggcttgcggctattcctggatcggttggagtaattatttccatttgcaaaattgaagcaattttcccaccggttacaacggttactgctgactttgattttaatggtattgatgtagcaaacaaagcataattatgctgcttttttgtaaagccattcacatgaatggctttattttaattttatataaaaggagaatatattctttatatagaaataagtttgaggttataaagcatgatgtacgaaaggagcaaggaagtgattaaactagaaagctttaagaaatctgattttaaacaattaataaattggattaattccgaagaatttctaatacaatggtcaggaaatgcattcacatttcctttagacgaacagcaattagagaagtatatagaaagtgcaaatacactcgctttcaaagtggtagatgaagagacttcagacgttattggacatatttcgcttgggcaaatagataatattaataagtccgctagaattggaaaagtattagttggtaatacgaagatgagaggacgttctataggaaaacatatgatgaaagcagtacttcatattgcttttgacgaattaaaactacatagagtaactcttggtgtgtatgattttaatacatcggccatttcatgttacgaaaaaatagggtttgtaaaagaaggcttattaagagagtcaaaaagagtaggagaaacgtattggaatttatgggaaatgagtatgttagaatatgaatggaagaagtagcaacgatagtgatttataattatattatgttaacaaaggggtttggtgagtatagtggataataaaacaaaaataatttcaattgcagctgtttcggggggaggtaaaactacaattacagaaagattaaagcataagtttaaaaactcaaaagctctatattttgatagttacacatttgataaatctcctgctgatatttgtaaatggattgatgatggggcgaattacgacgagtgggtattaacaccattaattcatgatattgagcaacttatacaaaataataccttagactatattattgtagattatccttttgcatacttaaatagtgagatgcaaaaattcattgatgtaactatatttattgatacgcctttagatattgcgatggctagaaggattttgcgagattttaaggaaggtacaatagatgaaatacataatgatttggaacattacatgacatatgcgagaaaagcttatttagaggcaattcatactgttaagccgaattcagatatcatattggatggttctttatctgtaagtgaaataattaatcacgctgtagaggaacttggccgaagagaagtgattgtcaatggttaaatgtataacagatgctgttaggtggataattgaagtaagggagagataaatgtgtacactttatttcaatataattggcaagtaagagatgattggtttaagtggtgtgaacaactttcagaggaagatttactttgcaaactgggggcatgttagaaacattatttcatattgtagatgtagagtatagttggattagtgctcttcaaggataagaagatagagaacagcaatttaaagattatcaatcgattcaaaaagtgaaagcgttatttaatttatataaacgagaacttgaagtttttttgcagtcataattatctagcctagaatgctagcacacttaaaataagccgtataaaaagttaatcattgtgtgctttgattatataatgtcggcgaaataaatagtgtgaaggacagctatcttaacaagtgtttcatgtaacgttcatatactttaatttttataattaattaaatttgaattttgtttgttgttaagaaaaggtgagaagaaaataaaaaaagagggctaatgccctctttttcttttaatttggtaattaatcacagattggtatcccaagcactcttagagctaatgctacttgaagggaaatctctaatctagcaatttcaataccagctactgaaagaactagaaaaggttgtccgtttacaaatacaacgcaactatccatagttaaacctcctttctagtaatttactatagtatatgagtagaactttaaaatgtaatagttcaattgttggatttaatagaattaatagattaacccatttaaactaaacaaacgaacacaacgaaaggaaacagagatggatgtatgcctcaaaaaacataggttttaagacatgtaatgggatatgaaattcatcatattggtcagctgtctgtatgggcgaggaagttaaacttgcaaccagtttcagcaaatttgaagaggatgatagaattaaaaaccgacttgcatcttaagcgcaagtcggttttatatatataagaagatttcttaattgaaatcctcggattttttctgacgtatatgtaaaaacattaaggtggtaatgattaaaaaaatcattatagtttgtataattaaattttaaaactgaagcaatattgtccaagatgtaagggcgtctttaaaagcttggagtgcagagtacgaggaaggatcaaaaccatactgtagcaacttttttgtttcaataaatgaaatgttttcttcatctgcatctaatattactgaaattagtctagtatctccaagttttgctgtactgacaaaactataattaccgttagttgaaaaactagtttgtaagccatcaacaccttgaagtttaatgttttcattaagggaatatatcattttattcgtattgaaaacctgggaatctttgaaggtaaattggtaagaggttagtttcgtaatattcaatacatctggaaaatcttttactaattttgctgctagtttagctgcgtctatcgctgttgtagttgattgtttatctgtatcattattaattccagtagagtttagaaatggagatggttgtaataactttagttcttttgcttttttattcattaatactgtaaagttatcttcatttccagcaatgtgttctgctagagcgagtgcagaacgattattccctgccagtagcaatgcatgaagtaaatcacgaaccgttgttttatcattcgatgttacttgtatagggcttgtttctactcggaaaacttcgttacttatttgtactaagtcatctaactgtatctttctatcatttagttgctccaatacgatatattctgtcattaatttagataaagcagctgattgtactggagtttcttcattttttttataaacaatttcacctgaattagcatttattaaaatagctgatttagcttgaataatcggaccatttacataaaggtaaaaatataaaacgataagtgcagtaatgaaaaaagataataataaaatagcgaatttttttaagaattgcataagcgatcctcctattatgacatcaatactagtattgtaaaaaggaatgcttaattaggaagaaagaaaaggtaaagaatttctaaagaattataaaggattattaaattttgggcattaatggaaaaagttcaatttcttatatgataagaaattgaactttttatttataatattaacatttgtatgggagtagttttacagtgaatgttgttttttcatcatcactatatacttcaattgttcctttatgcaattcgactatactttttgcaatagctaatccaagtccagatccaccagtgtttgtagagcgagatttctcaacgcgataaaaacgttcaaaaatatgaggtaaatccgtactaggaataggttgtccgtaatttgttatatcaattgtaatcatattattgctttcataagcagtaaggtcaatatagcgaccttcgcttccataagcgatagcgtttataataagattttcaaacacacgcactaatttttcaccatcagctaataccatgagcttttgagatgggaaagaaggtcgacattctatatttgcttcttgaaattgtatacggaattgaacagttaattgtccaagtaactctactatgtcaataggaacagaatacaagcttaactctttattttgaacacgtgtatattcgaacaagtcattcattaatgcattaagacgagttactttatcgtaaatgacttgaatatagtatcgcaattctacttcatctctataattatcatgatggattaaatttacgtatccaactatagaagtaaggggagtgcgtaagtcatgtgatacatttgtaataagttcactttttgcttgttccgcttgtctttcttcatcaatggagacttttaattgttcaacaatttcattgaccccgattgctaattcttctagataattatgatttacaatagaaactttatgattgaagtttccatttgcaatataacgaatttcttctatcatttttttaatacaagtttcatagtaaagttttttctcgtggcgataaaaaatgtaaagataggatgaaaaaatagaaaataaaaacaaataagatacaatcatcatccataacgattctttaatccctttatacttttcataaccaaaaattcgaatgaattctttaccgagttcagttagagtaagtgaactctcaattacactcgtaacgaggcgataaataattaattcagtaataggcgtgagtgtgatagctaataagagccaaaaaataagtttccatttagggatatcttttaatatatcaaatgcttcatttctcaattttatagccaactccccatgcccatcaacttaaggatagaaactctacggttttccattaattgaaatggataatttttcgactcatcagaaatatccgaaagtgttaacttctgcgtcatggaagcgataaaactctgcaggttggatacgccaatcatttttatcgaagcgcgcataaatttgagcagatttgtcgtcacaggttgcgccgccaaaacgtcggctacagtaacttttcccagcctcaatctcatctctctttttgcgttctgcttcaatatctggttgaacggcgtcgcgtcgtaacccagcttggtaagttggattaagcactccgtggacagatttgtcattgtgagcattttcatcccgaagttgcggctcattctgattctgaacagcttcttgggaagtagcgacagcttggtttttagtgagttgttccattctttagctcctagacctttagcagcaaggtccatatctgactttttgttaacgtatttagccacatagaaaccaacagccatataactggtagctttaagcggctcacctttagcatcaacaggccacaaccaaccagaacgtgaaaaagcgtcctgcgtgtagcgaactgcgatgggcatactgtaaccataaggccacgtattttgcaagctatttaactggcggcgattgcgtacccgacgaccaaaattagggtcaacgctacctgtaggaagtgtccgcataaagtgcaccgcatggaaatgaagacggccattagctgtaccatactcaggcacacaaaaatactgatagcagtcggcgtgtgaatcattagccttgcgaccctcggcagcaagaaccatacgaccaatatcacgaaaatagtcacgcaaagcattgggattatcataaaacgcctctaatcggtcgtcagccaacgtgagagtgtcaaaaacgataaaccaaccatcagcatgagcctgtcgcattgcattcatcaaacgctgaatagcaaagcctctacgcgatttcatagtggaggcctccagcaatcttgaacactcatccttaatacctttctttttggggtaattatactcatcgcgaatatccttaagagggcgttcagcagccagcttgcggcaaaactgcgtaaccgtcttctcgttctctaaaaaccatttttcgtccccttcggggcggtggtctatagtgttattaatatcaagttgggggagcacattgtagcattgtgccaattcatccattaacttctcagtaacagatacaaactcatcacgaacgtcagaagcagccttatggccgtcaacatacatatcaccattatcgaactcaacgccctgcatacgaaaagacagaatctcttccaagagcttgatgcggttatccatctgcttatggaagccaagcattggggattgagaaagagtagaaatgccacaagcctcaatagcaggtttaagagcctcgatacgctcaaagtcaaaataatcagcgtgacattcagaagggtaataagaacgaaccataaaaaagcctccaagatttggaggcatgaaaacatacaattgggagggtgtcaatcctgacggttatttcctagacaaattagagccaataccatcagctttaccgtctttccagaaattgttccaagtatcggcaacagctttatcaataccatgaaaaatatcaaccacaccagaagcagcatcagtgacgacattagaaatatcctttgcagtagcgccaatatgagaagagccataccgctgattctgcgtttgctgatgaactaagtcaacctcagcactaaccttgcgagtcatttctttgatttggtcattggtaaaatactgaccagccgtttgagcttgagtaagcatttggcgcataatctcggaaacctgctgttgcttggaaagattggtgttttccataatagacgcaacgcgagcagtagactccttctgttgataagcaagcatctcattttgtgcatatacctggtctttcgtattctggcgtgaagtcgccgactgaatgccagcaatctctttttgagtctcattttgcatctcggcaatctctttctgattgtccagttgcattttagtaagctctttttgattctcaaatccggcgtcaaccataccagcagaggaagcatcagcaccagcacgctcccaagcattaagctcaggaaatgcagcagcaagataatcacgagtatcctttcctttatcagcggcagacttgccaccaagtccaaccaaatcaagcaacttatcagaaacggcagaagtgccagcctgcaacgtaccttcaagaagtcctttaccagctttagccatagcaccagaaacaaaactagggacggcctcatcagggttaggaacattagagccttgaatggcagatttaataccagcatcacccatgcctacagtattgttatcggtagcaagcacatcaccttgaatgccaccggaggcggctttttgaccgcctccaaacaatttagacatggcgccaccagcaagagcagaagcaataccgccagcaatagcaccaaacataaatcacctcacttaagtggctggagacaaataatctctttaataacctgattcagcgaaaccaatccgcggcatttagtagcggtaaagttagaccaaaccatgaaaccaacataaacattattgcccggcgtacggggaaggacgtcaatagtcacacagtccttgacggtataataaccaccatcatggcgaccatccaaaggataaacatcataggcagtcgggagggtagtcggaaccgaagaagactcaaagcgaaccaaacaggcaaaaaatttagggtcggcatcaaaagcaatatcagcaccaacagaaacaacctgattagcggcgttgacagatgtatccatctgaatgcaatgaagaaaaccaccattaccagcattaaccgtcaaactatcaaaatataacgttgacgatgtagctttaggtgtctgtaaaacaggtgccgaagaagctggagtaacagaagtgagaaccagcttatcagaaaaaaagtttgaattatggcgagaaataaaagtctgaaacatgattaaactcctaagcagaaaacctaccgcgcttcgcttggtcaacccctcagcggcaaaaattaaaatttttaccgcttcggcgttataacctcacactcaatcttttatcacgaagtcatgattgaatcgcgagtggtcggcagattgcgataaacggtcacattaaatttaacctgactattccactgcaacaactgaacggactggaaacactggtcataatcatggtggcgaataagtacgcgttcttgcaaatcaccagaaggcggttcctgaatgaatgggaagccttcaagaaggtgataagcaggagaaacatacgaaggcgcataacgataccactgaccctcagcaatcttaaacttcttagacgaatcaccagaacggaaaacatccttcatagaaatttcacgcggcggcaagttgccatacaaaacagggtcgccagcaatatcggtataagtcaaagcacctttagcgttaaggtactgaatctctttagtcgcagtaggcggaaaacgaacaagcgcaagagtaaacatagtgccatgctcaggaacaaagaaacgcggcacagaatgtttataggtctgttgaacacgaccagaaaactggcctaacgacgtttggtcagttccatcaacatcatagccagatgcccagagattagagcgcatgacaagtaaaggacggttgtcagcgtcataagaggttttacctccaaatgaagaaataacatcatggtaacgctgcatgaagtaatcacgttcttggtcagtatgcaaattagcataagcagcttgcagacccataatgtcaatagatgtggtagaagtcgtcatttggcgagaaagctcagtctcaggaggaagcggagcagtccaaatgtttttgagatggcagcaacggaaaccataacgagcatcatcttgattaagctcattagggttagcctcggtacggtcaggcatccacggcgctttaaaatagttgttatagatattcaaataaccctgaaacaaatgcttagggattttattggtatcagggttaatcgtgccaagaaaagcggcatggtcaatataaccagtagtgttaacagtcgggagaggagtggcattaacaccatccttcatgaacttaatccactgttcaccataaacgtgacgatgagggacataaaaagtaaaaatgtctacagtagagtcaatagcaaggccacgacgcaatggagaaagacggagagcgccaacggcgtccatctcgaaggagtcgccagcgataaccggagtagttgaaatggtaataagacgaccaatctgaccagcaaggaagccaagatgggaaaggtcatgcggcatacgctcggcgccagtttgaatattagacataatttatcctcaagtaaggggccgaagcccctgcaattaaaattgttgaccacctacataccaaagacgagcgcctttacgcttgcctttagtacctcgcaacggctgcggacgaccagggcgagcgccagaacgttttttacctttagacattacatcactccttctgcacgtaatttttgacgcacgttttcttctgcgtcagtaagaacgtcagtgtttcctgcgcgtacacgcaaggtaaacgcgaacaattcagcggctttaaccggacgctcgacgccattaataatgttttccgtaaattcagcgccttccatgatgagacaggccgtttgaatgttgacgggatgaacataataagcaatgacggcagcaataaactcaacaggagcaggaaagcgagggtatcctacaaagtccagcgtaccataaacgcaagcctcaacgcagcgacgagcacgagagcggtcagtagcaatccaaactttgttactcgtcagaaaatcgaaatcatcttcggttaaatccaaaacggcagaagcctgaatgagcttaatagaggccaaagcggtctggaaacgtacggattgttcagtaacttgactcatgatttcttacctattagtggttgaacagcatcggactcagatagtaatccacgctcttttaaaatgtcaacaagagaatctctaccatgaacaaaatgtgactcatatctaaaccagtccttgacgaacgtgccaagcatattaagccacttctcctcatccaacgcgtcagtttttgacagaatcgttagttgatggcgaaaggtcgcaaagtaagagcttctcgagctgcgcaaggataggtcgaattttctcattttccgccagcagtccacttcgatttaattcgtaaacaagcagtagtaattcctgctttatcaagataatttttcgactcatcagaaatatccgaaagtgttaacttctgcgtcatggaaaaacaccccctatttatataaaaaactccccttgacttctcatagttggtctttcataattaagtttgtcattttctgcaaactactgaattataaaactactaaatatatttttccttgtaatcaatttttacattacacatattattacaatctattttttatacaattccctgtccttctcttctgtttgaataacatcaataaaaagtggatatgtaaaaatcttttgattattgctatagaccacatattcgtatttgccactctccataactggaaatcttatttctattacgccatcaataccaggagtcattctgttatctcgaagattttttaattttggtagttgaccactataaacaatttcctcgttagaattatatacaaggattttgttattaatttcctccaatccatcttcttcagaaaattgaaatttgaataaaactgatgtaataacagaagccggaagtataggaacagtaattttatttagaatattataagcagtatgctttttttcttttggatcaaacattatattttctgctattaaaatttgacatgaaatattattcttcatacttttctctccttattcatacaaattaacgaaaagtaagcgctatcatttttgggtaattttttactatctttctgataatgtacatattcatactttttaaaataacctatactgcttttcacatctgtactatcaattaccatatgatttctccagtgcttaacttttcttttgtatagccaaatcggtgctgttaatataacaacatatttttcatcaattgtttctagaagtttatcgatattcttaaaataataattatcatagctcagaaaaagaatatgatattcctccatctcgggtatgtgcaaactatcaattaaattatctatttcatatttttcttgcacatgtagtcgtttgttataataatgtgcataaacaataagtacacatgctattaaaccactaattactaacatcagatttatagccatagtttaatctttccctatcataattttttaaagatatgagattgtacaatagcacagtatatacactaagtagccctaagaataaacttatttctaatgttcgaaaagagaaaggtaacaatacttttattattaataatattacgatgattgaatttcttgcaattggagacttattcataaactgcatcttaccaaaacagctacaacttgttttctctaacttatataaatgtttttttctgataattaacaatataaaaccaatcattaaagcaatagtacctatttccttatatggataatatatatttaatacaaacgtgataaaaatgcacaattctaaaattagtaccatataactaaaaaatagtatagattttaatggtaaaatattatataaaattaaatcacattttaaaccatggatagaataacttttcatgtagaaagatgcaaaaaatataaatgctatactcaagtcgatacacgacgatagaatattaatttgactcaccttctaggatagaaagaagttcaactgcattttctatatcatcaattactctcatagcagttatcctgttattttcatctattagacaaaaacttggcgtttcctgaaagccaccttcatcaatcaattcatcaccaaaggagattatattaaattcaaacccaaagtaatcttttatctcatcaatatcttcaatagatccatcagttactaatacaaactctcctttatatgaatttgctatctctgatattttcgggagtagatcaatacatttcatacagcttaaagaaattgcccctagtagccaaggactcttatttgaaatattcattaaatttttaggtaatattttacccactgttaaataatttgtattagattgaggtggcactctatgtttttgaaacatttctttaaacccttttatcattctggagtcctccttaatattctataatacatttaaatttagttataatgtcttcaaacatattatcttgatagcctatttctgcatataatacttgtcctagttcattgacaaaatacgttctagggacaccactaactttaaattctttcttcatcttatctttattacataaagatactaaagctctaccttcaaatgtggatttgatatattcaaagttttctgggcttgtatcgattaaaataagaacatttaatgatgaatctttagttaaaaatttatcgagcgcttccatggaaggtaagcatccttcacatgacgtactataaaatagaattaagagatgttttttcaaaatatcatgtaatttgcacgtattcattgtatctatataaacattttctatatattctcctacatctaaacttttaggaaacctaaaaaatttcctatgcccttctagaattgaatccatagtatcctccttgttttttatttttcatacaattattaagcccttaaatttctgctcttttctacaataatccttaaaatttttatcatatctaactaagaaaaactttaacatacatttcttttaattggaatatttgtaaaattttataaagtttttatggaatattcagggaattaatctatttttaaagctatacatttttaatagctgatactgaatatcttctggttaattctggttttactaagaaaaacaatttaaataataatttccaaataataacactaaaaaaagaatgcctttctatttaaagaaaatggcattcttttttaatttttgctaagaatataaatctattatctattattttctcaagatatatctcattacaaaaatactatatagtagatcaaaatcatactcgcataatatgaatcatcaatacaataaaattcatcatagcatgtactatataagaaactaataattgttttgattgtttatatacaaaggccaatacacaaccaataaaaaaataaccaaatataaatgggaagtcaaaatgcattattgcaaaaaacaatgcactgattacaatactccctacctctttaaatttcttcattaaaatattcatagtagcatatcggaataccagttcctctaccaatggggcaagaattacaattgatataattgcaataggtgaaattgatgcagctgcaactatactagatgtgttttctgattgcgtagaaatttggaataaacttttatctaaaaaactaccaattatctgtgcaaggaaaactaaaacaattccaactagaatccatccacatgcggtttttgataatttaattgatagtatagatttataaatatgtttttctttatatatagtaaaagtgataattaatataagcagaaacccaattagctcccaatgtaccaaaatttgttgaatcgcttgttcttgattctcatgaatatcataccaacctgtcttagctaataactgcacacctattattcctacaaattgattcataataaaataaataagaatgacataggccgatttatgtatattagtagtattcatattattatattcatcacccttcttctttagacatttaccatcatctacaaatcctattctgaatttttaaaattataaaaacataaaaacatcatattttttattacacttcggaaaggtttctttacgctaaagtaattctttccttcataggaattatctcacaatctacttttactaattttccactaacaaatatctattacccaaacaaaaacaaaacttctttaaattttataaagggttgtgctttacatccacaaccctcgcttttctcttaatccacaggcacttcttcttgaccatgtggaatttgtgcaattggtgttacaatttgtgcatatttgtttacctgcactttaaattgtcgtggttctaaaaagtttacctgttgaattaaaacttcaatatgaaacgtatctacttttttcccacgttcaattttggtaattcgtgcattgtaaaacttatccccatttaggaaatatcgttgaacagcttctgtagcaagcatacgttcattacttgtcattttcattggttcaataccaaatccagcctttgtaaacaaatacgggacatcataactactattagaaatttttcgtagtaaatcctctacagcttttgtctttgcgatatattcctcttcttttgtatcaaatccctttggcttatctccaagcatctcaatttcatcttgatttacttgctcttcctcttgtacttgagatttcatcatgtaacgatgaatagtattataggtagtaacacctaccactagtacaataattcctaatatgaccaagtacttacgaggcatattggataaaatgttgattattttcttcatctactctcatcccttatcagtctataacattacggatttgcgtcatatgttgtcctcttgccgtatagtttagacctgtaatttgtacacccttattatcaccaatatgaatcattttctgatttcctaaataaatagatacatggttaggattttcatagaaaattaaatctcctggttgtgcacgaccgatatctggcacctgttttccttgtccaatttgagcacctgtccaatctcctagctgaacacctatactggttttaaacacatattgtgtaaatccagaacaatctgcactacctgcagctggatttctagcaccggacacatagctcactttcccttgcccaagccatttttttgcttcttctaataccttttgtcgtttagcatttgtcattgtaggagcaccacctgatgataaccctggatcatcatttttcttaaagaatttcattggatccgttggttggtcattaatacgaatttggaaatctaaatggacagcgtatccaaacatattaagaacaccaccaacatagttagccccccccatttccccaataatctgtccttttgttaccatagttcctggtgcaactaagattttacttaaatgtaagtaacgggatacaacgccatttccatggtcaacatagactcctaaaccaccgttgtttacatttcctgttttatccgtaaccataccagcttccatcgaccatacggggtctcctggttttccggcggtcatggccccaatatctacagcattatgcggtttgctagcatgaatttcatcaaatgtacctgtaatacgccctgatttcgttggccatttccaacctttatcagaaatccattctccagatacatctgccacacaacctaaatctttgtaatattttaaaactttggaaacatatgtgtagagtaaacatccagcgccttattacattcctgtgataggtttccatcacgggtttataggtaaatccctttcctaaaaaacctaactttatcatacgaggaggtggggataatggacaagacggaaacaagggaaatagtaacacagaagattgaaattagagaagatgataacggaaatcggacacttataggctatgcagtaaagtgggaaaagaaatccgtagttatgggatattatcgtaagtttcgtgagcaatttaaaaatggagcattcacagaaacattacaaaatgatgaccaacgttttttatggtctcatgatacatctaaagtgctgggaagaacaaagaataatacgttacgtttgagcgaggatgccgtgggcttacgctttgaattggatttaccagatacaactctaggtaatgacacttacaaatctattaagcgtggagatgtagatggtgtttcgtttgggtttagcatgataagcgaagaaatccaagaaccagatgatgatttgatgctacgaactgttacaaaagcaaaactattagaagttagcgcagtagctttcccagcttacccagattcagaagtaagtgctaggggatatgatccttataaacattttacagaagaaaaaaagcgctcggaaaagcgcagaagactatatttacaaacattattataaaaggtggactttgaacatgaataaagaacaattattaaaacgtaaatctgaaatcagtgaattattaagtgatgaaactcgctctattgataaccttgatgcaattgaaacagagttacgagatattaataatcagttggcagcgattgagaagcgtgaacaacttttaaatgaagcacgttcaattaatgaaggaaatgcagctggtactaataagattgaaacatttaatacggatccatcaaatgaaaaacgtgaacttggtacaaatacagttgaatatcgtaatgcttttatgaattacgtattacgcggtgaaacaattccagctgaattacgtgcaaatgctgttacgaaaacaagtgacatcggttctgttatcccacaaacagtattagataaaattatcgaaaagattgaagcggtaggaatgattctacctttaattactcgtacagctattaaaggcggcgtaacagtaccaacttcaacagttaaaccagtcgcaacatgggttgctgaaagttctggaagtgataaacaaaagaaaactacaggaagcattactttcaactatcacaaattacgttgtgccgtagcggtttctcttgaagtagaaacaatgtctcttgcggtatttgaaacaacattaattaataatattgtggaagctatgacaaaagcgattgaacaagcgattgttagtggtgatgggtctggtaagccaaaagggattctagcggaaacacctgttgacggacaagcattagatgttgcgaaaattaactacaaaacgttaacagatgcagaagcggctttaccacttgagtatgaagcaagcgcgatttggacgatgacgaaaaagacatttatggaattttcggcaatgacagatgcagacggccagccgattgcacgtacaaattacgggatttccggtaaaccagaacgcattttattaggtcgtccagttgttctatgtaattatgttgatagtttcgcaacggctactgaaggaacaacatttgcattcttatttaattacaaggattatattctgaatacaaactaccaaatgggtgttaagaaatatgaagacaatgaaactgacgatcaagttacaaaggcaattatgattgtggatggtaaagtagtagacaaaaactctttagttgttttaaaaaaagctccagcagcttaataaaggagtgatacaatgaatcatttagtcttgaatgctttcattgataaagaaacaaaagttggatattcaaaaggcgatatgtacgagtcaaatgattcggaacgtgttgcctttttaattgaaaaaggattcttaaaaggaaataaagagatttctacattccctaagcatactggcggtggatggtatgaattatcgaatggtgaaaaagtgcaagggaaagaggaagcgatgtcagctgaacaatcattgaggggtaacgaatcatgattttaaaagatataaaaaaggcattgcgcatttctcatgatgcccttgacgatgaaataaacgatgcaatagaggaagctcgacacgacttaatgttgtcgggtgtttcttctattaaagcgaatcatgacgatgatccgttaatcaaaagagcgataaaagtatattgcaaagcagaatttgttgctgaggtcaaagaggctgaaagattccaggcatcgtataacatgttgaaaaatcatctcactttagcaggtgattacaaatgaatgacattgtattctttccagttgtaacgactactacagacgatttaggacaaatagaagtagcagaagagtttacaagacaagtattttgtgagaaaaaaagtgtttctcaaaatgaattctttcaagctggtcaaaatggttttaagcccaaatgtgtattgattgtttacacattggattatcaagaagaacagaaagtacagtatcacaacaagaaatacaacatttatcgcacatacgaaagagacgatgaaagaattgaactctattgtgaggtgaagacaggtggctaatatcgatgatttatccaatgaaattgctagggaactacaaagatatgccaatgtaattgaggaagacatggaagtggcgaaggaagaggtagcggataatttagtgggtgaattaaagcaaaaaagccctaaaaatacaggtaggtatagtaaaggttggcgaaaaaagaaggatgggaacgcaattattgttcataatgctttaaaaccgcagcttactcatttactggagaaaggtcatgcgaaggcaaatggtggacgagtaccagcaaaggttcatattgcaccagctgaagaacatgcgattcatgattttgttgaacgtgttgaaagggcgattgggcaatgacattaggtgaactaaagaaaattcttgaggctacaggttatcctgtggcttattcgcatttcactgaaacaccaggtgttcccgtaccttcaccgccttatgtttgctactttgtagatggatcacctaacatggcagccgacaataagacctatcacaaaataaatgatgtaaatatagagctttatacaactaagaaggatttagttgcagaagccaagctagaacaagtcctggatgattatgagattccatatgagtcatatgggacttttattgaatctgaaaaactatttcaaaaaatatatgaaacgaggttgttgtaaatgaatgaaaacaaggtaacattcggtttgaaaaatgtacattacgtgccattagatattaaggatttcttagttacatttggtacaccaattccattacctggtggagtggaactaacatttgagccacgcggtgatttaattgaattctatgcggatgacatgctttattacgcagcaagtaataatcagggttacgatggaacattaagtattgctactatcccagaaaagtttgctattgatgcacttggtgaggaattagacgaaacagatggtgtattgaatgaattggctgatgcaaaaggaaaaccattcgcattattatttgagtttgatggtgatgtcaatgcaactcgacatgttatgtataactgttcagcaagtcgtccaacacttgcatctaaaacaaaaacaagttcagctgagccaaatacaaatgaactgaagtttgtttctagtccaattattttagcaccagggggaagacctatggttaaaacaaaaacaacatctaaaacaacgcaagaaatttataaaaattggtacaaggaagtgtacgttaaaaaaccagcagcaccaaaaggagcgtaatagtaaatggaaaagacaattacaatagatggaaaacaagtccgattaaaaagtacagcagctactgttaaacgatataaagcacaattcagacgtgatttatttgctgatatgtttaagttagggattttgtctccttcaaatcctcaagagggttcactagccactattgatttagctaatgcggatttaagtaagctagattttgaagttgtatatgatttagtttggttatatgcgaaaacagcaaatccagaaattgatgatccaattacatggttagacggttttgatgaattccctatctcagagattattccagaaattatggatatgattcaaagtacgatgggcgcaaaaaaaaaataaagaaaagtaatggagagcaagggacgttcagtgatgaagaattaaccactgatacgttccttgctctttgttataaagcgaaattaacgcattgggatttggaagtcatgacaattggagattgttttgattatattgcagaattcgctgaaatggagaatccagacaaagaaaaagtcagaaaagcaaaccaaaaagactttgattcattctaagaaaggggttaaattatggccggaaggattaaagggatcaccattgaaattggtggggaaaccacaggtcttcaaaatgcattaaaagatgtgaataaacgcagcaatgatttaacaaatgaattaaaagatgtagaacgtcttttgaaatttgatcctggtaatgtggaagctttagctcaaaagcaaaagttattgacgcaacaaattgaaaatacaacggaaaagctagataaattgaaggcagccgaacaacaagtgcaagcacaatttcaaaatggaaaaatttctgaagaacagtaccgcgcgtttaggcgtgaaattgaatttacacaaggatcacttgatgggctgaaaaataagcttggtaatatgaaatctgaacaagagaatgtagcgagttcaacaagacaattagaaacgttgtttagtgctacaggaaaaagcgttgatgattttgcaggcgcattaggtaatcgtcttgtaaatgcaattcgaaacggtgcagcaacaagtaagcaattagaacaagcaattgggattattggacgcgaagcattaggaacagaagctgatattgaaaagttacaacgtgcgctacgatctgtggatgctgggaattcaattcagcaagtacgaaatgagttgagagatttacaacaagaagctgagagaacagagaagaagtttgaagggctccaagtaggacttgaaaacgtcattggtggaatggcagctggtggcggtattgctagtgcagttgaaaaagcaatggatatgtcaaaattgaaaactaagattgatatcacttttcttcttttctgtcggttggctttgtttagcaaaattagatgaatcatcaaaattcggttgctttttaccagcattattacttctaccttttcccatatgtaatgcacctcccctcctccttactattcccaataaaaaaattctcttgcatccaagagaatttttgattgggttcttattaataatacccaattacttccaacactgctatttgataaaagatggatccaatgtcaaattctttaatgctgaaaaaagcattacattttcatatttagatcaatttttagatggaccacctatttatccgaatttatctaattacacgatccttccggaaggaaaagtatttatctatcatcacaattatttcataatgacagattccacgcttcatcttatagataaagacatattgcaaaaactttatttattaaagaactgtataccaatttcaaaaattaatttatcctactttaaaatttgaccccctatttcatcatatccctctcactttgtcgaaaaatacttagaataatacctatatttaaaagaatttcttagtggaattttcatcatcaataattattatctaaaagatactaatctaaagaaaactctactggttaaaagctaaccaatagagttttcttttttatctaaggattcttttaaaaagtgtcttttttatagtattttaaaaagaattcctcatactaacaccttattgttgcggctattcatttatttcaatatgatacttttccatctcgtatatgcaatagacaatgatagctaaactccaactgacaccataataattatgtgtgtagaagtcatatcccgccttaatacctttctctattacaacaaatgtaaatcctaaagccacccatttgttaattttcatcttaataaacgttaaagagataattattaaaaataaaatatttgtaagatgatttatcattagctcatatttttgaatgtatactgccatcatacaagcaacgatattagtcgcaatgccaaaggcaaccatcgctccccaacccctgtccgaaagtcccattcctgagtcagtcccttcctgaacaaaaatccttttctttaattcgttccttcatcctattcaaggtatgctaaattatccttgtctgatgaatatctatttatcttttcatatagagcaaacaaaatttctacttataattttttctttattagacaaactatgtctaagccgtttgaactagcggcttcactcttctggtaatgagatagcacaatttattgaattgactaactcattcaacccactggcaccggcaggcaacaaaatagttgtctgccattttcatgtatactttttctaatttcattacaaaccaaatgtgtgctgtattgatttcaaaaggacagaatttcattttttaaaatgtaaaaaagataagatcctatctacttttggtataggactttttcttttcacacatactatttttgaacttgtttaccaatacgtgtcctaatggtgtcttgaattcctcctaaaaagggctgcagatacgactgcatgcccttttatttacgttgctgctctatattgagtaaaataattaaaaactaaaaatgtaatattacatattttttctgttcagattatgttaagattcacttcatagtcgaattatggtttcgtatctaattcagcaatatgtgaactgtttacctaaagaaaagacacccaaaaggtgtcttttcttcttttaatctaaaaaacatttctcctatttagtaagatccaattagccctctaacctaagcctcatatttaaaggcaatttaatcatacactcaagagttttcatctatttcaatatacttataacttaatttccaatcacatttccagcactatatttgctttcttacagaatttctgtcttgttcttaattctgtcaaaatcctcatgtagctatacaaagaatatatgctactatgatattaagaaactatgcgttcccttaaccctgtatccggccctgtatttattacagggtctttgtttattttatttacttttattggcttataagagttaatacacaaccattttcaattaaaaccgtttaaatgttagttagaaattgaaataatatatctattagcttttttaacaaatgaaatctactattagatttctaaatgtatactgtactaagcaccaattaacactatacaaatagtgtcaactatgttaattgaatattggtaatagtaagtataaatattatcaatttactatatattacatttatgtaaaaatagacgtatgttgagcttattcaaaatctttcccctaataaagatttgaagtagcatttcatgattctccttactgttaatatgccttgaaaaagaaccctatagggttctttttcttttcattataacctcagtaagtccttatttaacatgcaaaaaggactgctaattatttgcagcccttttacacgttaatatacacttgtattacatgctgaaaactttattatattaggtatttataccaactaaacatgccattatcatttagatatataacacttcaaagtttagaagtatacaataacaaatctttcccagcttccagctacataactagtaactgttaattctctaccaccatttgctgatatatatctaccattacttagtgcttgtaatacatatatcctattgtctccaccattatataagataaacttttcccatgcaccaattgatgtacgatctgctactattctaccatttgaatcaaacgaaacatacttttacgtatgtttaacctacagccctaaaatttctacaatctgacgagctttattattatcaatataataatgcatctctaatccttttctttctgcacggattacaattccttttaactttgctaaatgttgtgaaacagtggattgtggaagtttcaatatttctgttaactgtgtaacattgcacattttataatgcattagctcacttataatttttaatcgaaccggatgcgccattacccttattacatctacatcttcttcgcttattttagctaggtcattattagatattactgttaacatttctcattctcctttattattaatttctattttcctattatccttataagtaatacttatagataattacaatttttcctgttgagaaaatatattctactcaatacaaaaagacacctattcaaaaaacagtttttaccgttccaatgaattggtgtcttgaaattttttagccacactttatttattcatattttaatctatatatgattttgaatgctgcttaatatacgttgcaaagcaaaaggaatatttccatccctttttaaacataatcataaaataagttatataaataatttgttatatttccatgtaccctagctgatataatgtataaggaaattattgattaattaatggttaacatatattagggaggtacataagtcatgatagaggtaatcgcgtcactatttttagtagtcgtatattttattagttatctcttttcaacaggagaagataagaaaaaagcaaaagctgaattaaaagaaattgttaatggtactcatggaaaaatattggtaggatttcttggaggtgcggcagttacaggaatatttgtagtcatttggatcttatcagagtaaacctttcagacattttagcttatataacgtataatgcagttattggttaattaagaagaaaagcattagagaaaacaagatatgaaataatatataaggatctcgccttttctgttgaatggtgagttttttaatgtacaaaaaaaagacaccctaaggtgtcttcctccgacttgaaccactttaattttatataaatatacacgtattacccctttgttatacgtgtaaacacatcctataaaacagaatcttctatttacaccagattgttagttcacaaaatatcaagagatttgagatcaatatgttacgtctttcaaaagaatctgctttatagaatgtatccacaatttatattttactacatgtaatatttatatagtatatttttgcgaatatgtataattgcataaagtttacgagaaaaagagagtataatttgatattgtgtaatgaagataaaacccacctacggaaataggtgggttattttatattggtgagcttgtataagtatgatagaataagaacaactatatattgtagggtggttggttgcgatcctttctcttatttatagggaaaggaggtgaccgaatggacattctttttcaaatattattagaagtatccaaaactattgtctgagagatcgcagtttttggatttaaaaaagttacttctaaaaaacagaagaagaccacccctaagccagcaaagcgtgggcggtcttctaaaaaacgcaaaaattaatttttaataaccgatcaccttacggtagcagttacttgaagagatgttgacgcatctcttcttttattatatacgtacagcaacattgaaatacctttaaggaaattataacaaatgtaaaaaaaaaagaaaagcccactggtaccagtggggtattgtttgggtactactatctcattgcacaaaagggcctttgcattaaaataatatcatattcttaaagttgttatattgagaattgaactacccccactttcacttcgtttagaagtgagggattcctaagtaaagagttctatcgaactctaattgattaggctaaccccgcagtccttgcggttagaagccttatcgcttcattctttagattgatacttgcgttaatatccctatcatggtgtgtacgacaagaaggagattttgtacatgcttaaacaagcgaaaatgtacatgtttatcttgacatttacaccccccatgatattaaaatattttaagtgtattttagcattcttacaaaaaaacagagaagatattagccactatattataaagcgcaaaaacaaactagtttataaactagtttgtttttgcattttacttgatttaaccatccattggatcaataaaaaagtctttatcacactccagtagaaacgtgggattatatatttaaaatttctcaatgtgtgaaataactaaatatggtaaaattatatttgcgagatacatattattaaaattaagatggttcaagtcgaaggaaggcaccttagggtgtcttttctttataaaaaaagacgcattacgcgtcttaaattaatttttactatattgttctttagattttacgctccgtccaccttgttaagcgaaactcaggaacgtacagattgtaaaaaagattagctgcagctgccagctaatcttttttctacaatctgtagttatcgagttgagtaaaggtggagcggtggcttacggaatgtaggcaactgccgtacatcccgtgccatgagccctaccagttttcaagttaaaagcaactactaacatttcaatcaagacaatctaacttataaactagttgacttgatctcgcatctgttctcctactttttccagactgaaagattttaatttttcccaactctttttagggtgtctcttccttgtatgtcttttcttttgttccttcttaatagcatctatcaacatttgtgggctatgatgaaagtatgcttgattgtagccgtcctcaatcataccgaaataatcacattcattgtcaacaaagtaattatctacaattaatttctcaaattcactttcaatataaccccaattgtgtactttactatcagaaattgaaacaccattagaagttatttcgagcttatccaataaatagtccatatactctcttgatattttctctaattcctcaattttcttcatatgttcctgattttccagaataaattcaatatacttcttttccatcactctcagccccttatttctttactgtcccttatctttatatttttccttctagcacttatgcactttctctttatgattttactctaaccagcatactaacataaaacccacgttaagaaataattacaagaatttatatagagaacaccttgcgttctctcaaagaacaacagttaaccgtactctatattgccagaacacgttcgagaacgtgttcttattctgagttctaggtggcattatatttgtatagatatttccccttaagaacactagttgctcttaaggggaacgacatttattatgtgtaaatcacatcgaaaactaaactagttgtcaatttagtttaaactagtttataaactagtttatttatatttataaaaaattagctattaatagctaattttttatatcgcttttcattttattgtatttttctaaagctttaagcgctgctgattttggcttagtacccatttctgaaaccttcggttttattatttgctcacttacattactttcattgccatttccctttatatcagaagatggtatttcttgagcgatgtgagctgatggtacttcaaccttaccgcctatagtatcttcctctttatccgaaatcggcatctcattcgtattattagttttaattattttgttaagctcagatgtaccaccaatcattgttaaagctaaatttaatagcatctcttgtcctatactactagatagcatttcaatttggccctgagacaaattttctgtagttaacgggatatacaatgctcctgtactaccgctatttctattgaacttcaaaccatcttgaattaatttttcagtaagtttatttcgacttatacctaattccgatttcatttcattaaattcattaatccatttagcatctatagaaggtgtaaatgttcttcccttacctgcctcataaccgacgttactcatatataacaccacacttcatattcttatatagcaaggaagaaggtgtgaatccaccttctattatgcttcaacgccttctttatttaattgctctaatagattagctattaaatatgatctacttgtaaagtatgctgactcttgaatgtttttaggtaaaataaagccatcttgttccttcagatctcttaaaccagcgtaaccaaataaaactccaccaccaactacaatgtttttatccgcatttgttttaaaccaaaacttcattagagatgctttttgatcttctgcatattttaacatcccatccattacaatatctgtaacattctcttttacagggccccatttcacactaaatgtcggcttataagtatcatcttcaatcattttctctacttcaggcatcactagcctttgaataaaatcttctcttgttttaaaaggtgactcaatttcatctgtcatgaaactttttaaaatctcattttccatgaaacgttcttttatattctttaaaatttcatcaatatacttatttgttcctaaatccgtatttgtagataattttttatttaactctccatcttcaaagaaagcattatccgaagtacctgcaccaagatcattgatagcatatgattctccaatttctgcatccattccttcaacttccactatttcaccgtttacaatgtcaaatagtattgccaagacagaggaaacaccttcaacattcattgttccatcattaatcgtaatttttatctttttaccctcatatgtaccatctaaaaattctacagtatgttctccatagagcatttctaaaatttgttcttccccacgtagtttataatcttcaattggcattccaccactaaaaggaacagaaacttcttcttttccaattctcgctgctgccaccgccatacttgtgaataatggaatcaaatgtaacttcttatttttctggctaaatttatcttccgtttttcccatttcgtctacagttggttcttgacggtcttcttgatctttagcatatgctcccacataccacgctctgcttcttgcatcaccatctaaagaattactaattatacgaacatgtaataactcgatgtcttcatctttctcatttacgtaatcatttttcttagaaggtgcagattttaaatctatttttgctggcggcgcttctgcgattactgttggaatagcaaaagattcaatattacctttttcattcaagaaactaattttcgctttaatattacctgtatcaaaaccaccaagtaacatgtttttagatagcatttgctcaaccattatattttcctcctacaactagtttatagtttagtttaaactagtttatcaactagtttaattaatgataaaaaaatttatatccatatttaacttttaaacataatgttcgtgaagagaacagtagttgttcgcttcacgaacacattattcacttgctttgtataaagaacatgttctgtaacgtgttcttctcttgaaaagtaatttcgtactcaatatgtattagaggacatcatcaggacgataatgctctacgccagtacactttttaaagtccttgctattccatgtcaaacaaggaactccgttcttagtagatacagctgctaaataagcatcagcaaaatcaattctattggttttatattcatgtaatgcttttaatactacatcactttccaatgttttaacgcctggtgaagtaataattgttgtaagattatcggcaatctcttcatgagaataaccgtatcttttcatacctaaaacccaggtacactctattatcactattggtgttaaaaataatgtaatttcttgattaacagctctcttgaagatttcaaaagccttctttgattgttcttcatcgtcatttgtcaaaaatcttacaatgacattagtatcaactacgtattgcatgtactgcactctcccttattcggaggaaatcatttcttctttagcttcacgtctaatttcttcccaagacaaattcggctcaccagctttaggtggcatagcaccaaacaatgccaacaaagaattttttttaactacatttacaaaaacattgtctccttcaatcacaaattgaatctgatctcctgcttttgcatctatataatctctaatcttagctggtattgtgacttgtcctttctgagaaagagtagacgtaaattgacctgaagacgaaattaaccctctgttctcattttttatttgcatagtacacacatccttctttattttccgtaggtgttgcattttgttatttctcagtaatttaatccttaatactcctatactgtatagtgtattgtaaatgaacatataaatgttcaattcttgatatagtaattagcgtagtattaagtgtgcctctgcttacttattattatactactaccaaaaataaaagtaaagattttttaaaattctttaccaaaaataaaagtaaagaattcatccaggtctttacatcgagagtcaaacttcagattcatacccttgtatttacccatcaatgaaaagtttatccttatgggattcagccgagatacgtgtaaaaatgggtcatagcctggaattcgtttccataaaatgaccttttgctgtctttataggtatataatgaaattttcaacaagatctatataaaaaacaaacgattctttcaacaagctgtcgaggaagaatcgtttgtttttttatttcagcaacactctcacttcacgtctaaacgcttatagagaaacgtgtcgcgcctgaagactgcataatatcaggtagtttttctgaaataccattgctctctaccataataattgctagtacatatggaactagctctggtacaccttgcgctgcacattcctgctccaccatcgattgccacctcatgacttcaggtggtaaattctgcactgaagcattcccacttatgccaccattcggtgtacctgtagagctttctccacccaaaatcgccatactaacaattaaaagaatcgtaatggctgccgcaattattactcctgtagaaccacctaacaagcgaacgagccattttattcttttcactttcttatacttgtctattgctgtttcttgcgtcgctgccattttactgaccacctttaaagcgttctaattgtttctcgtcaggatcaaacatcacgttatatgtttcagtagaacttacctgtacaattgcttcccctcgtttcaactcaggtaagatacgaaactccgattctgttaaactctcacctagaacactttttaaagtctctaacacggagttatccatgttcaagaatattttgtattgagttaattcaaagatggctttcatcgtagacacatccactgtacttcctggtggtggtaacatttcttgtggggattgtgtcgcaaaaaatatacctgcaaagaattttcgcatctcacgttcgaactctaatacataacgattggcaaattcattttgcgaattgataatgttatgacactcatcaaggaaaaccatgaaatacttaacgtcttctattgataagtttttttcttctcgtaaatacttcatttgacgaccatttttaagcgcatgactccaaatcaatgttaatgcggtaaacaattgacagttaaaaactgatttatcgtattttgaaatcccatcaatatcaaagaaaacaatctgctcattttcaaagtttttaagtgttgtatgaccgttaaacatatcaccgtacaccgtaatcatgtcctccacctgcaatttgattgcttctaaatcacggagacgttgtggtgttgctcccgcttctagcttcagctcacttaaatatttataaaaatcttctaaaattggatagtgattaggagggaatcccgttactttgtacgggcgatcacttcccttttgaggtacaagtccccactcaatatagaaagcatacaaatgtttacgaaactcttgaatcaccgtatcatcaaattctgaatttaaaaatcgaaccatattcgtgactttagaaatatgttgaatgaatgaacctttctcatcaactgcacctgtatttgtaattttcgttgcgaatacttctaaggggtttatcattcctgtttctacttcttccgaatcttgaaccccacttaaatcaattattttaccgccttgctgctgcacaattgtgtaataatctcttgctttatcaaaaccacgaatgaagcaatctttcgcaaccaatccttcttcgatttgtttaagtagtgttgatttaccagcacccatcttaccaaagatgaaaccactaaatgatgttctagtacttgtagagaaaaacggatctaaaataaatgcgccacctgtagtagtttgtcctagataaattcctcttggatcttttaaatcttgatgatgaaatggaataccgaaaccaatattttgtgaaggtaatggatagccacttttcactcccaagtattctatttgatcgtcatagcttgcaaacaatgtttgccactcttctttttgtttaaaaacatacacttgcgctttatagttctgccccgcaatttctttcttaatatcaccaattcttttctccaattgttctagcactggatcatatatgaagatacgcaactttatgagtttaacaatttcaccttgctgcgtaatagaacgagcaaagtctgttaaattttgtagttcccaatgagcatcgtcacgatcagtagaacgacgttctgatgtcatacggtcttttaattcagtaatagaacggttaatgtcttttactacttcttctttattcgctgtcgctatgtctacacttgaaacggtatctttattgttcatgagtgccgttagccatagcggaggaatatcttcagctagatagtacacatgtaaacatgcaacatagcaatcaccttgcgctatgtacttctcattaaatttaatgccaccttgcggctgcaccctcgaaataaaatctaaatcatatccttcagtacgatattttcggtgttcttttttccccaactttaccattattcatttcctccttttacatttctgaattcatgttttgtagcttaaagattagcttctcaacttcttttgctttcatattctgcaagttaaattgacgtccaccatagcgcttcatgtccttcacattctttactaactctgtttcattttttgcatacacaacaatgaagaaagccaattcctttaaattcttttctacccacagtacccgatttaaattttcaattgctaaactatagcgttgagaccataagtgttcttcgtttctctctgacacatcttgactcattttcccttgataacgtagcgccatgcgcttccagtacacctgttgttctgttgtttctgtagagtacgttagagacaaaatcttgaatggctcatgatacacacgacataaactagttaactgattcataaatcgatttaaatcatctttgttcatagaaattaagtccgtagtctttacctttaaatacacctgcaagttgtctctacgatctactaagatcccctttttttgttccagtcgtttataaggtgcaacatcaacaattgatgcatccgtatttttaaaagaagcaaagatcgttgaaataaaactttgttttccattacttttctctgactcaacttgtctctttcggtttacttttttagattcaactgtcgcaactttcatcttcatctttcctttcatgagatataaaaaaggagagcgctatatctgcactctcctttcattcctatttcttttttgtttcgctgcttatggtatttacttcaattggatgatagtttttattgtccatcttcaacatatccaaaatcacaaatatatttctatttgtaggactgttatgaggtttaatacataagaacaccccaaacgccccaaacagcacataaaacattatccttccaagtcctccgactggaacaagcttcgacatataacttgctagtactaacattagaactatgattgctccatccatgatataaaagaaggctaacttaatttcttgctttgtattcttaggattacgcatcatttccattactcaacactccccttattacgttataaattttatttttcccccttattgttacaagacttatactctcttatcgtacttttaatatataggttcatagttttaaacattttactatcgttttccatacgttcctttataaaaagtggatacttttcaaacttagcataatattgtttaactggatgttcctcaggataatctttaatatcatattcataaacacgcaaaccataataattacgcaaacctttaggattcaaaatgtgcaagcataaaaatgacttataaattatctcctttgcttctacagaatcagttaattcattagctaaatatttttctgtataactcggaaatttgtctacacaaaaatcaaatatttcttcttcctgtgttgtaaatgctatcctttgttttcttttccaacgtataattgcgtaaatagtttctcttacaaagcaatatacccacattgctatttgtaaaatccatacccccacaattaatacaaataaaatcccaataatccatttcactaaagtatgatctaaagaccataaaaaccattgcttaataaagggcttgtcatatattagccaacttaataaggcaggttttactataatgcgcagtaaaggatcaagctcaagaaagatatgctctgaagcatctaattgcatatctctccaaaaccctccattataggcaataaaacatatcatatatactacaaatgaaagtgttgttgtaaagataatttgcattacaaattgattatttagtatttctattagaaactctttcattaaaattccccccaaaaaaatcttgatttacatactcagcgttcattactgtaaccaacttaggatcttttttcttctttcgccttagcactctaaaaatctgtttaaaaaaagttgcgatcatgcttaacacaatcgcaactcctaacatcaagatagcaaatatccagttattcatcttaaaatcccttttgctttctctctattttttgatgacttgtttttcgagtacagatggagagaaaaataagttagaaaggaaaaaataacaatgtaatgatataaatgatctaattcaaaacttatttgaaaaaccattatagcgacggcagcaaacaatcccgctattattattaagatactcgcctgtgattctcgctgtttcatctcaaagtaaattcttctttgattcgcaatatcaattactttcacagctaaccctcctaatctcattttctacgtaattgatctgtccgattatgtttacttcctctttgtcttaatcctgattttgttctttctactacattatcttgtacatttacatctcgctgtactgttgctgctcctgcccttgcagtatgctctaccgcttcatttcctcttagattttgtacatgcttaaacaagcgaaaatgtacatgtttatcttgacatttacaatagtataaggggaaagtctttatggtaatgcggaattcgatctttatgtaggattacatgatttaaaagttcttgatttatatttttcatgagtttagcgctccttttttgagaactttgtgtatgtagaagcttttttatggggtaaacaagtgaggattgtttattaaatatattcatggggatgagtaaatattatgagtgtttttgcagtcaacctgaataaggaagctattctaaaatgaaaatagaaaataaagataatgaaaatttataacaaacatacaatgataagaggatgaataatcaaaatgatccagtttatttgtgtatatttttaagtttgacgataggaaaaatttattactagagagatgatattatgaggaagaataattatttaatagtaggtggaaatagtttcattggtatcaacctcgcattgggtttattgaaacaggggcaaaatgtaaaagtattttccagacatataaataattttcctcaaaatattataagtgaagttgaatttattaaaggtgatttagaaaatgttgaggatatatataaggctttagtgaatatagatattattatttatttagctgcgacgtctaacgtagcaacttcaattgaagatgttttcggtgatattaatagcagtctattttttcttaatttcatggaaagtgttaaagattttcgtattaaaaaaattatattggcttcttcgggaggcacagtttatggtgaacctgaatatttgcctattgatgagaaacatccattaagaccactttccccgtatggaataacaaaagtttcgctggagaattatttgtatttttataagagaaaatatggaatagattatgttgtatgtagatattctaatccgtatggaaaataccaaaaccccttaaaaaaagtaggggccataaattgttttttgtaccagcatctcagtaatgaaaggattcatatatatgggaatccggaggagattattagagattatatttatatcgatgatttagttgaaattactatacaactagcacaattaaatcaattgaaatcttgcgtatacaacatagggagtggcaaaggtctttctttaaaacgaattatagtggaattagagaaaataacagaaagaaaagtggattttatctgttataaacaaaaacaagagaacgttcaaaaaatcattttaaatattgataagataaaacaagaattgaattgggaacctaaaatagattttaaacatgggattagattaaataagctatggattgaagagttcttatgtagtaaaaaataataacccacgctctacttgtatataagcagagcgtgggttattattttatttctttttctataacccaaaggtcttgatgttcccaccaaaatccttcagtatactttttgataattgggttatggggtaatgatttaattttgtcacacacgtaagagggactaactatcgtttgtccgtattgattcacatctaaatcgaattgttcactagaggagagaaaccaatagcccttttcatttaaatttggaaacccaaagtattttttgctttgatagccatgggttgtgaaaatgaataaaccaccaggtgaaacagcgttatacaatgtttgcagccaacgaaaccaagttgtatcaggcatatgagagaaaaaggatagacaaaaaacgatatcgtacgtagaggagtccaattttaactgttcaggctcaggatgagataatatagaagaagtatttaatttgttttcaataaaggaaatggcctcttcgtgtatatcgcaagtggttatactcaaattcgtttgtagatttaataaatgacgtgttacgcagccgtatccggatgcaaattctaacaattgaattggattggctgtaggaggataaagggaagtaattaagtttaagagtatttgtgctgagttttgcccatctttaaagtagtaatctatcgcttctttttttgatgggaagacgggattagtgacaatgaactgaaagatatgatcctcaggatggatgcttgcatttacattataactgtgtgcgatttgagaaattaaatctttatgttcctctataaagtctttcaaagagtattcctcccttgagtaatagtagcaacttacaagagatattgatggcatagaaagcacatgtttaaattttcaagtatgctttaagatactttctatatgtatacattttcattttagaaatgccgtcgatagtaaatctttctttaatgaaattttgcatttgcacaacttcattgtaatgggagtatgaatcttctgttctcgttacgctatttaaatgtcgtctatgatagtttaagggggctggattgaagtaaatatctccctctgtaagaagagaaacatagaagaaccagtcgccagctattttgaacttctctaactgtttttctgttttcttcatatctatatttttaaaaactacacttgaaacattaggtatagtatttttgataagtaacgtatcttgtatttcttcgaccccttttcgaaaatagggggctttccatttttctttatcgatatcatttgtgtaatttaaataatgattagccaatacatttccttgttcatctatttgttttgattgtgtgtaacttaaggtaatattgttatttatataaaacccctgtatcacctcttgtaaaaatgtcttatcgcataagtcatcggcctctgcgatccaaatataatcaccagttgctgcagagactccttttatccattgtttaaatacagaaccagagtttttatcattaataatctgttgaaccttcaggtgggtcttattttcttttgaaagcagctttttaaaagttgatacgctatgatcagtggaggcatcgtctaagaaaattagttcgtaaagagggtaggtttggtttaatattgattcgattcgatcaggtaagtatttttcataattatagttcggtatgattacacttatctttttgtaattatgttcgagaagatctagtaattgataaatgtaattaagaaaattgaagtttttttcgataagttcttggccaaagcttcccttttgtaatcgtaatccctcatcatgaataaattcatatattttttctagcattttgggtaaatttaaaaagtctactaaggcaccagttttttctgtaacaacatcttcaaaacctccagcatttttaaaccctataacaggaagttttgcatctaatgcttctaaaacaacatttggaaaaggatcttcccttgaagttaataagtataagtcagccccagcgttatataatccgatatcgggagtaggatcgactaatgtgaaatgtgctttatatttagggggcagtgtattcaggaattgaacgtctgttctccctacccaaatgaaatgaatatccttgtgagtctttcttactgagtaagagataagtgagaatagatctattccttttcgataatctgcgaagcctacacccaagatgattttgctatctagaggcaggttaagcttcttacgtaactcatttctagcttttgcaatattgttcttataaggattgtggttaaacaaaccttgagggagaatgtgacatttttgaggatccaattcagtgattgtacgaaatttttcatatacgtattgtgaagggaagacaactttgtaagcaaattcagcgatgtttttagctttcccttcagcagagtactgttgtattaaatgcggtaattcatgtattaatgaaacaacttttatattgtgtctagctagtaatgcgacgatatcgccacttatgacagtgctacatatggcgagggtaaaattctgtgataataaatcctttattaataattcgaccttttcttctgtttgataaccttgctcgagacaataaacaggaccgtacttttgaaaatcgggaattaaaataccggatccaatagaaataattgcaacagagtaatcaaagttttctttaagagctttaatagtatgtaaagaaagtagctgtgctccgtggaaatgggcatcatgggatacataaattatctttttattaacatgcatttcataacgcctcctaagtgtattagatttctttcctttttttaaaggtaaagaagagaagtgttttatttataatccccctagagatgagtaggagggagtacgtactaaaagaaaaaatactatccttaatatatatttaccgggtctcacattcattctttagaaaagtattagtattaagttagagagtgtaagctgcagattgttaatctgaatacataagtttaagaagttctaaggatgtgttagaaattaagagagggcaaagcttttatgatttataaaataaaaaatataaaaggtattgacgattgatctacaggggtgtaatatagaacaagtcgccgatgacattaacgtcgcaagcgacaaacgaaatgaaaaacttagttgacattaactaacgaagatgttaacataaggaagtcgcaaatgagcgaccaagtagttctttgaaaactgaacgaaacaaacaacgtgaaacgtcaatttttattttagatgctagacaaactaaaaaacaccccctatttatataaaaaactccccttgacttctcatagttggtctttcaactttctatacttattataacacgcattgctatgcgtatcaataggtgagggtaaatttctctgtttttttatatgtttttttatgaatatatcagtatatcgagcacccaaattgggtgctttttattatgtgaaaattacataggtggtgcttagtaaatgacacgacattatttaataggtacattagttaattggcgtgaaagtgtagaaagatttcactacaatgaatcattccaatttttaaaagaagaattccaattaagtgatgaagatacaataaaagcattttggttatctttctataaatggtacgaatacagacacccgaagttacgagagttattaggagaatggtaaggagtgagcaaagcgaatggctaaggaatatgcaaaacgcttttataaatcaacagcatggaagaaatgtaggggggcatatattgctgcaacattagatggaatgtgtgagcattgcaaagaagtacctggatatatcgttgaccatatagtggagattacaccagtaaatataaacaatccagacatcacattgaaccatgagaacttacaatacttatgcttacaatgtcataacactaagacatttagtaagtacagtccgatgagggaagatgtaatgtttaatgagaacggtgaattaattaggagggattagagatgcagtgtaatggtaaggtgttaaataaagaacaagtagacaagttacagttcatgattaataactattctaataagggaatggatatttgtacatgtgatgtagagcgggtactaaacaaacaatatatgaaactaacaaagctagagaaagctattgctcttagcatagtctttaatgctattgataccaaggaactagatggacatgtaagtaaagaaaaattatcggatgtacttaaaataattgaagcgttaaaagaagagatagatgcagataaagagttagaagaagaaaaagaagcgcatctaaatataattaataaactaattgatagtttattagcagaaaagaatcaggaacaaaaagaaccaagccccccctttcaaaaataaagcaaagccccttagggggaccgagaggggagcttcacgtaacacacaggtcattgctatagggggtgtggtcatgggaggagtgaaattttatgagcgataatttagatatagaaaaagaaaaacgaattaagagagagatgacacgattaaacagtttattaaagaatttagagccgaagaaaaagagagctgtttcttcactcataaaaaacgctgcttttatggctgtcactttagaagatctgcaagaagaaattaatcagaatggtgttacggaacaataccaaaacggagcaaatcaatttggagttaaaaaatcttcagctgttgaagtatacaatacaatgataaaaaaccatgtacaggtaatgaaacaactaactgacttgcttccgaaagaacagcctaaagaagaggatgatgggtttgaagactttgtgaataaaaaatgagtaaacgaataagaaaacagtatccattaacttataatccaattattgagtattacaatctcattgaagcaggggaagtaactgtatctagtaaagttaggcggatatataagaaactcgttaatgatatatacgatacctcttctgtatttgagtacgatgcgaataaagccaatcatgtaatagaattcattgagaatttttgcaaacactcaaaaggtaaatggggcggtaagccaattgaattggagatttggcaaaaagcatttttagcagcttcttttggatttgttcataaaattgatgggacgagaaagtatagagaagtactcttaattgtggctcgtaaaaatggaaagtcaacaatcgcttctggaatagggttgtatttgcaagttgccgatggtgaaccaggtgcagaaatatatgcagttgctactaaattagaccaagcgaaattagtttggctagatgctaaaaggatggttaagaaatcccccgtattattaaaacgaattaaaccgcttgttcgtgaattaaatgcagattttaatgatagtacgtttaaacctttgggaagtgattcagaaacacttgatggtcttaatgttcatggagcgatgatggatgaaatacatgcttggaaggataagaatctatatgacgttatagtggatggtacttcttcaagggaacaaccaatgatatttatgattacaacagctggaaccattcgtgaatcagtttacgatatgaaatatgaagaagccgaaatgcttttaaatggtttggacgatccagacggctataaagacgatcgctttttaccaatcatatatgagttggataaaagagaggaatggactgataatactaaatggaaaaaagctaatcctggtttaggtacgataaaaaagatagaccaacttgaaacaaaggtaaacaaagcgaaagcaaattctttgctagttaagaacttactaacaaaagattttaatatccgcgaaacaagtacagaagcctggttaacatttgaacaattaaataacaaggctacctttgatgtagcaaaattaaagccttcttatgggattggcggttgtgatttatcttcaacaactgatttaaccgcagcgaaggttatttttatgcttccaaacgatccgcatgtctatgtattacaaatgtattggcttcctgaagatttgcttgagcaaagaagtaaagaagataagattccatataatttatgggcagaacaaggaatattgagaacaacaccaggtaattcagttcattataaatttgtaacacaatggttcttagaagtcagggatgaattaggtatttatattccgtggatcggttatgatagatggtccgcaaaatattgggtggaggaaatggaaggctactttggtaaagaagcaatgattccagttgcccaagggaaacaaactctttctagccctatgaaattattaggagcagatttagagtctaatttagtaaattacaacaataatagcattgataaatggtgcttatcgaatacagccattgatgtggataaaaacctgaacatacagccgaacaaaacaaataatcagcgtagaagaattgacggaaccgcagcgcttttaaatgcatatgttgtgcttcaagaaaaacgtaatgattacttaaatatgatttgagggaggtgaggaattggggttattcaacaaaatattcggtagaaaacaaccgcctactacgacccgttttgaaatgataaacgataatggagggggctttttctcgtggaatgggaatatctatcaaagtgatattatcagagcctgtatacgtcctaaagccaaggctgttggtaaattaatagcaaagcatatacgagataatgcaaatgaatttaaagtaaatccagagccgtatattagattcattttagaagaaccgaatccattaatgacaggtcaaatattccaagaaaaaatgactgtacagctagagctgaaccataacgcctttgcatatatcaaacgggacgaattaggagttccaattgaaatttatcctttgccatgtgtaacagtagaagttgtagagggagctcaaggtgatatttttcttactttttattttaaaaatgggaagagaatgaccgttccatatgtcgatgttatccaccttagaaaagattttaacgaagatgatttctttggtgaacatccaggtaaagctttatcttccttaatggatattgttacaactaccgatcaaggaattgtgaaagcaattaaaaatagtgcagtggtgaaatggatattaaaattcaaatcggttttaaaacaagaggacattgatgcacaagttcaaaatttcaagaaaaattatttgagtattgataatgaaaacggtggagcagcttcatctgatccgcgctatgatttagaacaagttaaaccagaagcatttgttccagattcaaaacaaatgcaagaaacaacacagagaatttataacttctttaatacaaacgaaaaaatcattcaaagtaaatacaatgaggatgaatggaatgcttactatgaatctgaaattgaaccgttagcaatgcaactttctggggaatttaccaggaagtttttttcacgtagggaacgtggctttgggaacaaaattattttcgaagcagcaagccttcaatatgcttctatgcagactaaaatgaatttagttcaaatggttgatagaggagcaatgacaccgaatgaatggcgttctattctctctgtaggtccaattgaaggtggcgacaagccgattcgaagactagatacagcgttagttaaagacggaaatacaactgttaaagaccaactatgagaagtcaaggggagttttttatataaatagggggtgttttttagtttgtctagcatctaaaataaaaattgacgtttcacgttgtttgtttcgttcagttttcaaagaactacttagccgctcatttgcgacttccttatgttaacactttcgttatttgatgtcaactaagtttttcatttcgtttgtcgcttgcgacgttattgtcatcggcgacttgttctatattacacctctaagctctaatcgtcaatatgtttttataaaaaatataaaaaggcttatttcttttaaaataagcctttttatcacatatcattctattcatttattatttttctataattggtaacgaaacgataaattgaataataccatccctatattccgctcgaatactaccaccttgtaactcaacaatacttttcgcaatcgctaaaccgagtcccgacccttccgttactctacttcgagattgatccttcttatagaaacgttcaaacaaattcgctaactcttctctcgtaaactcttcactatgattcgcaattacaatttgtatatccctacgctgcctttgaagagaaacttttatatctgcatcatctttactatacttaatcgcattcattagtaaattatcaaatacacgaaccatcttttccgaatcaatcgatgcataagcacgttcctcaggaaacttcttaacaaacgtaagtccatgttcttccgcctgcggtactaactcttctattaattgctcgagtagctcattcatacaaacttcctgtttttctaatacaacttgttcatttgttaacttcgtatactcaaataaatcttctattaaattttttaactgctccgactttgcaaaagcaattctcgtatactcatcgtgttgttctttattttcatatttagaatctcgaagtaatcgtaagtagcccataatagaagtcagcggtgtgcgtaaatcgtgagatacattcgtaataagctcattcttttgcttctctaatttacgttccttttctatattattcataagctcttctgccatattattaatattctcagttaaagctgcaatctcatcttcaccttttttctcaatgcggtacgctaagttgcctctttctatttcctttacaccttgtgccattgcttcaatctgcttcatctttctctttgttatatagaagaaagagaaaatgaatacaagaacaccaattaaaaacgggaatggcccttctttcgtgtcatacattacctctccctctggaattccgctaacaaacatgtacaaattctttccttcaatagtaataggtgaaaaagatataaactcttttcttgtactttcaaatacatttctaccatctgtataattaatcgcaaatgatgctgcattacgaatcgtattatgcaaatcgatttgctcttcttgcgcttgctttgttttatataaaactttaccactttcatcagtaaccaatatctttaaagctctagacccttgctctaaattttggttctccatttcgatcatatttgatatagcttctaatttattttcatgaaccgaactatttgccgctccttgagcttggtgattaatttgttccataccagcccgataatcgatagttgcttgacgattcgcattctcaaaaaatggcgcagctcccttcgctgacaaaactcctaataacgcacaagcagcaaaagtagtaatcaattgaatccttatactctttcgtacgctctttactaatttctcaattaattctcttattttccttatataagtaaacggattaaatatctttttcaatcttataccccactccccatactgtttttatatatctaggtttccttggattctcctcaatcttttcacgcactttccgaatgtgcaccattacagtattatcagactggaaagatcgttcgttccacaccttttcataaatttgctccgcactaaacaccatacctggatttctagctagcaattctaaaattgaaaattccctcggagttagtttcacttcttctccctctacaacaactttatgggtcgagatgttgattttcatctccccaatttctaactcgtcctcattttggacagcgaaaccattcattttcatataacggcgtaactgagatttaattcgtgcaattaactctaatggattaaagggcttcgttacgtaatcatctgcccctgttgttaatcctaaaatcttatccatatcttgcgttttggcagaaagcataataataggcatttctttcgcttcccttaccttcatacacatatgaataccatccactttcggcatcataatatctaatacgactagatgtatttcattttcttccaatagacgtaatccttcttctccgtctcccgcttgtaatactttatatccttcattctttaaatagattgtaattaaattccgaatttctttttcatcatctacgacaagtattgtttcgtgtgccacaatatctcccccatcacttttttaatccctaacttctattataggaaaacttctgaagaaaaacgctcggaaatccttaagattttctgaagacgcaaaaaggtctagactccccttaagtctagacctttaaaaaaccccttttatttacgaacgtagatgaaatatagtacgaataaaactcccataacatacataattggatgaacctctttacgacgaccactcacaaccattgtaattggatagaagataaatccaatggcaatcccagttgcgatactatacgtaagtggcatagagataattgtaaagaatgctggtactgcaatctcgaatttcttccaatcaatttcccctaaggaagaaaccatcaagattcctacaataattaaagccggtgccgttacagctggcgttacaacacttaataatggcgagaagaatagtgccagtaagaagaatcctgctgttacaactgctgtaaatccagaacgtcctcctgctgctacccctgcagacgattcaatgtaagacgttgttgttgatgtacctaaaatcgcaccaattacagttgcaatcgcatctgcaaataacgcttttcctgcacgtggtaatttattgttcttcattaaccctgcttgatttgcaaccgctacaagcgtacctgctgtatcaaagaaatcgataaagaagaacgttataataacaatccccatttgaactgtgaaaatatctccgaagtgcgttaacgccacgccgaacgttggttctagacttggtattgctcccaccacagctttcggagtatcaattaatcctgttgcaactcctaagatcgctgtaagaatcataccgtagaatactgcaccattaactttcttaatcatgaagatgatcgtagtaacaaccccgaagattgctagtaacgttgtgccctttgttaagtcccccaacccaacaagaaccgcatcgtttttcacgataattccggcattttggaatccaaggaaagcaatgaataatccaatacctgctgctactgcaaactttaactccgatggaattgcattaatgattttttcacgaatacctgaagcagtaagaataataaagataatacctgacattaatgttccggcaatggccgtttgccacggaatacccatcgttaagactgctgtataagcaaagaacgcgttaatccccatacctggcgctaaagcaattggatacttcgcgaaaatacccataattaacgaaccgatcgctgccgctaatgccgtagcaacgaatactgcacctggatccatccctgtacctgctggtaaccctttaacatttccaagcgacagcgtagcaggattgacaaatagtacgtaagccatagatagaaatgtcgttaaccctgctatgaactcagtcttataattcgtaccgagctcatcaaactgaaaatagcgtttcatcctatgtttcccccgttatatgattactcgccgtatttcaccctagccctcttttatcccgagaaataaaaaaggcttccattgcatatatacatggaagcgttctataaacaaagacaagtttcccctcatctttatacaaacgcctcgtagtcaagccatttacggtagctaggtagaaactttcgggccatatccccgatattatacgacggctataatattcacttttcgtttgaattacataatcatattaactcgacgaagtagttttgtcaatttaaaaacgaacattttcataaacttttatagtttcgttcgtattaatgccaaaataaaaaagatccatctatgcataagcaatagatggacctttttataaatactattcccactcaatttacaaaaagtatcacataagaacacacactgataaataaatagagaattattttctctaacttttcttcgctagtatttgaaattaaaaagatggtggagttaccccaaatataacagtgactttgtttaaagaagtgttttcccatttatgctttgtataaggtgggattttaacactatcacctgtattgagaagtaaaacctcatcatttagatatagttttacttgtccctccataataaatgctatttcttcccctttatgtgccacaggctccatagatgaagcagtttcagggaacagattcattaaagccaattctagtgctccatctaaattaggagataataactcatatgaaacattgccgctttcaggaaaagttatttttttcctttggttagctcttacaactaattcttctgtattggtatcctctaagaaaaagttaaacaatggaatatttagtgctacagaaattaattttagtgtttgtaatgaaggatttgtgattcctttttcaatctgacttaacatggaaggtgttatatcagctaactctgctaaacgtttactggttaatccggccccttttctaaatgccctaattttgtgaccaacattaatatcgttcatatatgtaatcccctttaaataagcaaataaaattaaattattattaattttatttacttatacttaatatattgttaatatatacttaattataataaattattattaattttaaaacatcatatgtacatatggcagcagctgcgaaaaaatgggaaaaagatttaattagaaacaaaggggttactatttttaaatatacagcgggctataataaagcagtagaagaaggaagaatacaagttaataagaatcaaatgtgctatttgattgacgatgaaaaatcaaagcatttattttaaggttatgcagtagctgatactcgtctgaataattgatatacaaataaaagttggtgaatggcatcctctatttgtatatctaccatgtggaataggatttggtggagtttcattcagtttaaaaattatggtatgtgatcatgtacatgtaatttttgctgggcctacccattctccgtatatgctattaggtatgatgaccggattatatgatgggatttccataaaagatttttaatgaaaaggaatctaataagtaaaggacaacttaagagtagacttcaatgctgtattgtaaaatttttaaggaagtgaaaatagtatgaaatcagctttaaatagtattatgatctcttcgattcttgcagtaggagggatcattgcgcttttgtttaatttaatgggggatcaagattggatctggaattgggtagggctattactggcatatctatctttgggcattttaatcggtttatataataaaactgtggatcacaaaacatttcctaaaatactaaaaagaactttgtttatttcctttaatgctactatattagggataataataggggtaacataccaactattaggaaagtggaatcttactataatgatgtattattggttgataattttattactacatttaattactataataacattagtcatcctagtatttgaaaaccataatagtaaaaattatagcttactatatagttttattataattttaaacattgtccttaccttaggaccagtattatttccagtagttctgactattataggaaatgccatgaacgctagtgcagggcactaattttcacctatacagattattattaagatagaaagaagattataatatgaaaattaagcttaagaaaaagagaattataagtgtattgttggctattactttagtagcaatagggtattacgtgtttcaatctattacgaatcctaagctggtaaatgcggaagaggcaaatagtgttcagcaagtgagcagtctacctaaaaatgaattaaaaaaattgatacctaatcgttttgatggtaaagaaagaaaagttgcatatttaacttttgatgatggacctggaaaatatacagctaatctattagatgtactaaagaaaaatgatgtgaaagcaacattctttttaattggcgataatgtgaaaaggttcccagatttagtgaaacgagagcatgtagaaaacaattatgtgggcatgcatagtatgacacatgtttttaaaaagctatacaccaatcaggaatatgtgaaggaaatgaaagaagatcaatctttaattagaaacgttattggatacacaccgaaattaacacgtccaccatatggatcaatgcctggcttaaatgaatcacttcgaaatgaagtggtaggaaataatttgaaagtatgggattggacaattgattctttagattggaaatacaataaattacccgttgatgtagcagctgcaaagattgttcaaaatgtcttagcaggtgcgacgtcttcaaaggaaattgttttaatgcacgatattcatccacaatctgtcgcggcagttccagtaattataaaagggttaaaagaaaaagggtacgaatttgaagcttatgatgagaacaatcattttccaataaacttttggcatgataatcgtatataaagagatatattagttaaaagaaaatcagaatggaataagcaattcatatagggtttaaatatttgtaagagcgtgtttagatagatgaaaacacgctctttttactgaactattttattgtagatttaagtataggctttctaattttagaaaaatttatatgattttttcattcatttctacataagcgttggatatttcgtatgtttggccagaatgaaaagagtttattaaaccattcattattcacgttcttcttcatatatttgtaccacaattatttttttgttgttaaaactagtttttaagaagcatatgctttagcaactgcagaaattctgtatcacttttatcatcttttatataatcctgttcgtagttaaaaatcattcgtactaacataaaagctgtaagcggtaatgggaccttatgcaaagctccttgctgataacctttttcgagcaaattacttatcatgttaattgcttcttcttcagattgtttaaaacaagttgtaatttcaggtgaatggtactctttatattcttgaaagagtgtagaaacaaacggatcttgatgatattctaggctgatataatgaagaattttttgtattcgaagtaaaacatctttttcttctttatataaattaaataattgtgagcgtttaagctgaatatgacgcatatagcagtcgcataatatttcagttttatctgtatagtaataataaatagtacctttaccaactttagctgtctttgcaatttcatcaaccgtcgtgttacggacaccacgcgtagagaacagtattgtggcagattgaatgattttcatttttttattttctttttctaatttgatcattgtctacaccctatccttgaaatatttagcgaagttttctatctttacattctgtattagttcatttgtaattttgtaactcctaatagaaagtcctctatttgcttcttatagaataacatacaccattcttatttctagtatataactataatagaatgcaactgtatcacttaagataaaaatgaaagtttaaggtaataattttttaatcggacgatgatttctttcttgattgaattatttgattttttattcaattcattttattatataaacatgactaaaagatgtttttagtcggattttttacggaaaaccgactgatattcgattttagtcggtttctatactatttgagagaaggtagacactatgtgtggaattgcagggtggatagactggtctaaagacctgtctcatgaacaagaaacgttaaaaaaaatgacagatgctatcattcaccgaggacctgacgcagaggggcattggttttcaaaacgagcggcattaggtcatcgacgtctcatcgtcattgatcctgaaggtggccttcaacctatgctctataaagatggaaatgatatgattggccttacgttcaatggagaaatttataactatcaagaattacgtaaagaacttgaggagaaaggtcataaatttcagaccaagtcggatacagaggtattactacatgcttacttagaatggcaagaagattgtgttcaacatctaaatgggatttttgcttttggtatttgggatgaaagatttgggaaattgatgctcctttgataactttaaacgtttatattttttagttgacatattaccgcaggtctatcgttatatataataacagtctactacaatttaaagataatctaaaatttcacttaccgtattaagtagatttctccatatcgctccaaaacactacataacgatgtagggcttcaatgctttttaaaccaagatgtaacttgatctctaccggcgtcattcctttttgtaaggcatttagtatccaacgattccgtaacgttgtaggagtaacgtggatacttgcacgtttaatttctttttgaagcatcctttgtacaccaattttcgttaatgctccaggagcatctttctcataattccaacgaaatgtttgtggtccgaaatcaaaagctacaaataatggatcgttactatgttgttttggccgtatcgtttcaggaatgtcatttaaatagtctaggactaattctctatcttttttagatagctttacggtgcgtttaaacgcacttgtttgtcctggggtaataataccttcactaagttttaaatcgttcatggatagcgaaataatgtcctgaatagataaaccatactttagcatgaaacggactaacaggatatttcggttcaagatatgtattcttccggatgcctggtattctgataatccatctaaactttttatagtgcgcataagtttacgtatttccctatctgaagcgaaattttttgatgtaaggggtggaggggcaacatcactttttaaatcgcttgtattaccatgaaactgtaaaaagttaattacaactcctttaatcctttttatgttagatatagacgctccacgatctcttttaagagcatttaagaaactaaacaatgtatttgtatcgaaagattgaaagacttcttgagaaggggatgggtgtctttttttgatccaggagacaaaaatagatagatcgtattggtatctttggagagtagattctttgcgcccgcgactcttaagtgaagacaaaaacatgctgacacttgtttcgtatttcatttctatatacctctcttttctaaaaatcgtgtaccgcaattatacgccgaaaatcttacataatgcaatagggggttcttgtctcttttatgttctccttcttcttttcttgtttttttcgtcgcgaaacatcatctaaaagaatgaggggatgtgttttctttactcctgatcataggttattttagttccattacgtggttagttctgaaaattcaatttatttttaatacgaatgtttcataagtacatttaaccctttattcgcattaatatcgaagtggatcagtgatgaaaacatcaatttctcaaataataccttcgatatttcaaacagaatacactaaggaataagtttagaatatatttaagaattacttatggaattactatagaaatgaatagaatagctataggaataggcgtaagaatacttgtaaattagttctgtgcctattcctatagctattctatactaaaatcctattatatcaaggtagattctaattcttataaagatcaagattactgaagttatccttgagatagtaactgtattctacgaatactgtaactaatcgaaaggctattagtcttttaactacagtaaatccgcggcggccggcagcccattcattccatattccatcatccaaatccaactcaacatctttcgtatttcggtacgaaacaccatccatcgttcctggcatataatatatatcacatagcttgtacatatatattatctctgtatatatcctacctatataactgatctctagatcacactataatattatgtcagctgtcctcactattaccctctcataaaaaaatgctagttgccctttacggacaactagcattttcacttcaatatccctgtactttttttgttcataatcttgtacatatatctcgtatggatcatgaccaattacatttctgtttaatagttttgatgcacatattcaaacaatattatcgcgatttacagcaccaaatatattcggtgctgatgtttcttgtttcacttcttcttttgtttcttctttaattgattcctctttttttacagattcaccttttgagggttcaatattttgaacagaaggttgttcagtgatcactttagaaacaactgtattatcttgtaataaatttttcattttgttgaactcttgataaaattcatctttcatcaacaaatctctatgcatttcttgctgtgcttcaaagctttttacgtctaacgttccatattgttttataaaaaactttattaaagtaaataacgattcacctatattatcttgattttcgtaccaatcccaaaattccggatcatttactttttttagtttccatccatattgttctggttttgtttttgccttcataatttaacaccaacctaaactaacacttctttttctagtacatctaagccttcaatattcatgtcaacagcatattcagccggaatccatagtaattctaatttatttcttttacagaacgatactaactctttttccaaatcttcttctagtgcaattgatcctcctccataaattgcaatgacttcggcttcactggctgtattatttctatatttattacgaatatcgcgcaaaatattctcagcttgaacataacgagtctcatagaaaaactctttagcttcttgatggaatttgtgttcctcatgtaataaaatctcagcaaattgttgacgggtaatttctccaacccctggtctgttattctgtaaaagttttatcgcttctaacaaagcatgtccgatacctcgacgttcacctgtgcatgaatcaggtttaggatttaatccttctgtataaatgtactctgttgtaccatcaccaatatcaacatgcaggattttctttgctgaaaacacttcgagttttaacattttttggatttcttcttcggtatattttagttcttgtttacaaaattccacgtattttctaaacatcttattctcaccatcagcaatcgcgcgaatcattcgatacaatggaggaatcccctcacgagtaacagttacttgttcaaaactaactgttacagtcaccttctcttcagcaacatctacaattgcaatgtgtggcttttctactaatcgtttttctaatactctagcgtgttctggtttccattcacttgctggtatagctgtagttagctttacttttacatcaagtgttgctggtaaggtgttagtttctccaaattccttttggattgcctttgcagctacaatactaactaaatgaataatcggtagatcatcttcatgttttccaccttcttcaatatccattgttgttgtatccttagcaaaattcatcgcacgtttgccaactaaaaattgaccactacgctttattgtattgcttgtaatatgtacctgtaattcatctagtaaattcacaacacatttttcaatatttgtttcacttggatcaagaggtttaaacaaacgtttgtatacactaggtactttttcaatcttatcttcaattttgaacttaactttactatttccaatatccgcttttaagttaaacatcatactcataaaacacatctccttttgtttactattccattactatatgaatattttccaaaaccttattggttataaaaagattactttttgataccttattgtaattgtaacacgatcctttgggtgatgcaacaaaaaatgcaataaaatcaccaaaagattaccaggggattactttttgatacctttattgtgactaataagtgttttatttgttatttttccgtaacctttcggcgagagggtgttttcgcattatgttttaggtatctttctggttatgatttgtatgtcagttgtaaagtgggcagattatatgaaaatccgtgggatatggacgatcgttgttacaacaaattgaaacatttgggtgtgacagtgtctaataaactttgttataaacttctagatttggttgtaacagttttttgtacttttataaggaagaatcactgattttgttgaaaatcgaaaacagactatttagcgaagtttagggaggatgtgtaggtttgatatttatatgcactaatattgggtataaatgctaacttaaatatgtacattaacgcttgaataaatatgtacattttcgaaaatgtacatatttattcaagcgttaatgtacatatttaagttagcatttatagataaattatatgttatgataaaaagcaataaagtacatcatcctgactttattgtgtatgtttagcctatgtatgtcgtttgtattaaaaaataagaagtctcttaaaatgagacttcttatttttgtatcgagggggtattacagatgattaattactatcaaatatttttaattaccatggcaggtattgccttgtttttttatatacaacaagctggaaaaccaacgaaaagaaacaaatggaagtttttaattgtagtatttttattttactttttgaattatttattacttaaattttcatagataaatatagaggatttataaatatcgaatatattaaagaattataagttagcaaaagcaattagtaaagtatcatggtcacagttttgagccatgttagaatacaaagcaaaatggtatggaaaacaagtcattgtcgtatctaaaacattttcttccagacaattatgttcttgttgtgggtctcaaaataaagacgttaaaaatctcaacctacgtaaatgtgtttgcccttcatgtcaaacacatcatgataaggatattaacgcaagtatcaatctaaagaatgaagcgatcaagctgctaaccataaggactgcggagatagtctaatcaattagagttcgatagaactctttacttgaagcctgtagatgtagatgcttacgggatatatatgaaggaaaacgccaccttactgcaagtcctgtatattgacgataaggtcatgtggacacaactaaaaggatatgagatggataaacatgaacattaactgtcagatggtgatacttaagacgattagtaagctatagtttgtaacaagaagacatttaatgagtatttattttcaacaaaatacgggttttgtatggaatttcctgcaatgaattcaccatggataaggttgtctcatatcatgtaaagattgctttattaagattataaaagggtgtgaatgcattggaagatgtttatgtgaaaattgacagtttaaaagcagaacaaaaagaaattatgcgagatattcgtaatttagaaactcgtacaacaattaatgagaaagacatagctacaattaataagcaattagaaaagattagcataaatacaacttggattttacgaattattattagtgcaatcactatgtcggttttggggttaatattaaagggtatgatttaaaaataacagtacttattgagagatggacgagtatctctctttatttttatcattttagccaagatagtttttaaaacatgttataggtaattagtacaattaaatggaagacattaataattgtttagcaatggtaaagtagacgtatataatttaaaagagaacctatgcagcaatacaaataataatttgtatgtgaacgtaaaaaataccaagaccgtcctagaaaggagggggcttgatattttttagttaaaattacgattttttaagtgaatttcatattctgttaaccatactaatatcaagcactttaattcaatcgtttcaatttcgcaagtgttttcttcatctcccacatatcggtgggtggtctttgtataatcgaatcttatctctaaatcgcaattgttaccccattactatcaagttaaagttttataatgcccttaaaatgaaaaacacattattctactataacaatacaattttgtatgcaatattgcatatttatacgttatgcctctattagacattttttaatggtaccatagcaaggtgagagtctataagggttctccttaataggaggaaatatggaaagagtgcaaaaagtttacagtaatccaaaacttaaaagttggattaaacaggtattagctgtaggaggaataatagggtgctgctatttggtgttatatgttttctgtttcttagttatcatgtaaatattatacaattaaactagtagagtcttgcctagagaggtaaggctcttttattgtatctggagatgagcaaacaatataaaatacatcttaggtttgtcagattactttgtacggtgccttgtttctctatgttctagaccactaactcctatcatcgagagttaataaacttctatttaaagtttccatttatattgaaaacagaattctattgataaaaaatgtgtttttactagatatatattaaaaagataagcataagttatattacgttgtgatagaatctttttatctttgaaaaggatttaaattttaataatagatttgagtcctttttgtatattataatccctatgtttgtatataattataatatattgaaaatgatttaaaagcaagaatattagtaggggtaccgctacattgccatcaacttaagaaattaaatgttcctcaaaacgaaaatagtagccgtcggctactattttcgcttttatttaagctagcgtaatgtctctgaaattttgaatgaacgtggtgtgtcagttcatccaaaaactattatgtgctgggttcatgaatatggcatctgattcagcaaatttggtaatcacccaggtgggcaagctgagtatttaaaagttccatttggaaactttactctatttgttataccgtaattttgtgaactggaggatgagtccctcttttttatccgatgttttacagaacccctattggagtgtcataaatgcaaatgtaaagtcaggggatactgttatcgtgcttaattgtggacctgttggattgatgccacaaaaatttgcttggatgaaaaatgctaagcgtgtaattgctgttgattacttagattatcgaatcacttatgcaaaaaaagattagcaatgctggagtatttgagtttagaaattatcccaatatgggggaacggatgtgggcatggatggaaagaaatcacctttggagttttttgaacaaaaattaatgagttttaaagaaacaaatttttgctccttgggggtattaaaacctcttaagttgatggtgacgtggtgctactcctgtaaagatagtaggaggactacaattaaaaagataggcaattctctgtatagaggaattgcctaatgaaacggattaaaagaaataacagacgaaccaattatattaaaaactataatatatgcatatatttataaaaatattttattattaagaatacattaacatgtttttagtatatctgtgttttctactgattctgcactgaaaattatagtaatagcatttaataattaagcttaaggaaaataaaaaatttatttaataattgcctgtgacaaaaatctaaactattaagagtagataggttaagtattcactgcattaaattcaagaaacttaaactaccaaaagggaatttcactattaaatctaccatatacataagtcaattataagatcacggaaacttgattatatgtaaatattattcaattttgtaaaagacattcattgacacttatgtatataagtaactatactcgttacatcgaattgaatgcgtgataatacaattttattattattacaaacatgtaaatataaaaatagaaaatttcaatttgataaatacaatggtagaggtgtttattttaatgaagcacaaattaattgcaacaggtatccttgcaggagctatattatcctattcttctaatattttagcggatactcataaatttcctgatgttcctacatgggctgataaatccgttaactatttagttgataaacaggtattaaatggttatccagatggaacttttggttcaaatgactccttagacagagcttcggctacaaagattatgacaaaagttttaggaatacaaattgatcctactgcaaaaccatcttttacagattcacaaaatcactgggctactccttatattgctgctgctgaaaaagctgggattgttaaaggtgaaggtaatggaatcttcaatccatccggaaaagtaactcgcgctgctatggctacgatgctagtaaatgcatataaactacaaagcacaccaaatcataatgatcaggttagatttgaagatttaaaagggcattggggagaaaaatatgccaatattttaatagatttaaaaatctctaatggtaccgagaacggttggcaaccaaatagatttataacacgtgctgaaggggtgtttttgcccatccccccgaaaagggggaataaggacaacaatactttattcttccaaggagtcttctcgtgttaagctggtgagaatatcatctttattgatactctcaagaatttcctctatatttactactgttggggatttactaaattcataacgaccataaaaattaatatgttgccatgcaattggtgaaatatactgtaacattttcatctcaaaccctgtatctttggattttattaataaattcgataatatactcgcattgtaataaacaacacagttgctgagcagcctactacattcattccagatgtgctgatcttgttcagtcttgaaacgaagtttcccaaagtttgcataggatactgatcgacgtaatttatgatagctttctccacgatttagtgatttttgaacattttgacgtaacgataatgaatcaatatattctaaaaaatataggcttttaatgatgttatcatactcccatagtgcccgcttggtttgatttttccgtgcataagaacttaattttcgaacaataacattttgagtcgtcgtctttaaagcaagagataccataattcgttttatattgtcccattcttttacaatgagatctgtattaattttacgcacaggtttaatcagcaattcttcataatggcttggatgttgaaaaccatataaatttcgagatatcgttgcttgaatatctttatatctaggtgcaaattggtaaccaaacaaatctaaaatagcaaaattaacttcattcgttccatgtgtatctgtagaatggatagtaggttttatattggttgtattattgtataaaatatcaaatacataatggctttcatgctcatttgcaccaataattcttgcttgaattggaatgtggttagccaccattgtatacgaagtgattcctttattcattccaaaatatttagaagaatgacgagactgtagtgtatgaatctgtgtttcgtatttttggccatcactacttgaatggatgaaatcatcaatgttaaaatacgggaaaataggaagcttacttgtggcattactgatacaatcatttacatcttttaatgtttctaatcgaataaaattagctgatgtagtagctaattttgaaaaatctatatcagagacttctcccattctatataaccccatatttgttccccaagctattaaacatggaatgagagtataatcctttgctttttgattggcatagcgtcccagaatatgttcaaagttatctagaaaattgcattgctgatttacaaaatacaggatactcctcatatcaacttgtggtaatacatcgaaaaaagaatgattaataagagatgaagatcgagtatatggaagtgtccaagaatgatgatttttatgttttttcacttgaacatatttgttttttccagaagtaatccttttattaatagagatgatacgagcttccaatttgttttcaagttcttttaaatgttgttcgatgggctgttgtagcttagttaaattgaaatcttgaatcatactctctttatgtacccacgtatcttcatcgactaaatcatcttcaaaacttctatactgtatgctatctctacaaaaaacatctcctgattgtaagcggtaccataaagaatgataaattaaaaattcatatcgatctattagtaaacgttttgaatgcgcatcatctttcgtgtaaaggtaacgtttggccccattttgtataaaggtttgtggaatattttcgatatcatatttaagtaaagcttttcgtttcataaaaacttcttttaaaaaatgtattgcatccataagaggatcttcaatatctgttgtaacaaaatcaatcgtcataaaaataggacgaatttgtctcttgaattgtaaagctaatgtatcaatacgttcccaacggaacgctttttcatctatcttcgaagtattcaggatttgatttgctagctcagttaatttaggacggtctaggatagaaaatacacgtctttgtatgtctttaaatactgtatgttcggaaatgttttcatctattataacttgtaaaatatttccgactttcttgaaatcttcctggttttctgtgtaatagttatatacttgatcttttgcaaaggataaaatatcatcgttgtattttctcattttataaataaaactattgatcaaattatcattcattctttggtatcgatgaaaaataaagcacaataaataaagatttacaagggattcattaaacctttttaatttatatacggaataatattctactaaagaagcgtaatatttaatactttcattagaaatttttagttgtggcaaaattgaattggccagttgaaaaagaggatacatttctttcccatattcaatttcccgtttaatttcattcatactaaagtctttaggttcatgtttgattcgagtaatcttatataaaccagaaggattatataataattcttttaaatgctgtttatccgcctcggatagctgtttttgtataacccttataaggcggttttgttcatatgtaatagcatttcctataacctcttgtataaagctataaccaggaataataattcgtttagtagttaaataatttataagttcgcgaaaaataaaaatcggtttcccacttatagctgcagctctacgagcttgttcttttaaatctagtcgagattgtgaatcacaaagataataattaaagcgcttaagaataagttgttgttgatttagcctagtttttttatcaatagatccaaaatctgagaagtcagcattattgaaatgaactttaagaatatattgaatatcttcttccacttcacataggttaaattgaaaaaataagtgctttgacttaaagtatccaagttgaagaataaaataaatcttagattttattgaacgtaaagtatataacaattcagtttccatttgagaaagagaaaaatattgtacgcgctctttagttgtaaaaagaggtctactataaagttgatttatttcatctgtagttaaaatagttaatcttttttgaatattcatatttaatcgttttctacatctccttatgaattataattataatagattacaccgtgtcaaaaagtatactttttgacacggtgagtttgagtagtttttaatgtttcacaattataacataattatttttgaaatatgtcatgagagttgtatagaatttgacattaaaatataataattatatcttataaccaacaaatttttataaatatagattgtgtgtgatttgaaatgggggaaggaatacataatgaggaaattcttttatattagagtaagtagtaaagatcaatctatcgagagacaactcgcaaccgcagcagagataagtattcctgaagaatacatctttatagaaagagcaagtggaaaagattttaaacgtcctgaatatcaacttatgaaacgtatgttgagaaacggcgatgttttatatattcaatccttagatcgcttgggaagaaataaacaaatgattttagatgaatggcaagaattaattaaagaaaaaaagattgatatcgttgtgttagatatgccacttcttaacactatgaaatataaagatttaaatggaattgaaactcttatttcagatttaattttacagttattaagctatatggctgaagatgaaagaaaaagaatccgcgaacgacaaaaagaaggaattacaattgcacttcaaaaaggagttaaatttggccgcaaaaaagttgaaattgatgataattttaaagaagcttatcaagaatggaaaaatcataaaattactgcagtagaagcaatgcaaagagtaggcatgaagagtaatacattttatagaagagttaaagaatatgaacataatttggaagaaaagaagctctcttaaatagaaaagcttctttttacatactaccctatttcaagagaaattattaaaagtcaaataaatcccctttaaataatttgatttttcgttattttttgtcagttatgtgttataatgataatgtacatgtaaaatggtttgaaatattagtatagactcattcaggaaaagcgcgttctacaatagaacgtgcttttgtgacctgctaattttccttttgtatgtttaaaaagagacatccactttaagaaacgaagcgctttttcttccttaaaaacatatggaaaatcttcagaaccttcacgctcaatatctcttaaaaatcgtttacacgcttgtttatgcttctgacaagcaacaacttcaccatgtaatacatcatcacagtagtccatcatccattgtctgatcatgttatacgtcaaactccttttctacatttgttttcggaccttgtttactatttggaatgacaattttcgctcttgcactcggtgtaagaccaaactcaacagccaaagccttcatttgttcatgtaactgtttcttctttgtaagtagtggatggggaactttattcgtttcagctgccttattggtatattcaacaagaagtccttcttctcggataattttggtgcattcaacatagtcagagtaagcatcgcaatacgttgctaatgcattcacatctatgtttgtaataacatctagctctagtaattcaccagcaatccgtctaaattctttcttagcaattgaatctaaccacgttggtggttttaccttgtccttttttgcttgtaactgtttttcggcttttaatcgctgctcaatttcatcttttgtcaatcgatttgtattaccttctaataaatgcaaatgaatcggtttcgctttccttcctatgtgaaccacctccctcggctgaacccccttttatggaataaaacgaactttttgcacggaaagctaggcggcggtctccaggaagtcgccttttgctttttcatagtggggggatgcttatgactttttctttcgaattattttttgtttttcttctcatcttcttttgttttcttgttatggcaagcatggcaaagcgtttgtaaattagatggttctaatcgtttcgaccaatcaacacggataggaatgatatgatcgactacatcacctatcttaatgatgtccttacttctacattgaacacataagccatgatctctacgataaataagctcacgcatttccttccacaatcttgagttgtagaatgaacgtgagcttttgtttcgaatatgtttgtcataatattttactgtttctttttccttttggatatgtttagcacaatacttatcccgtgttagttcgttgcaacctaacgacttacacggcttaaatggtttacttggcaccttccatcctcttccttaaccgtttcatttcatcctcgattgccagattatttttattaatccggtcgtgatactttgtaatgtcagcttgatgcttacgaatcttatcgttcacatatgcagcaacatgctcatgaccacaatgtggacagatgtagaaacacttctcaattctttttggaagctgtgctacttgtggttgcatatcgtaatctttattgcagctagaacagtagacttgcatctatcctcactcctttagaaagaatatttcgattatatatttaccaaataaatacaagttgttataataaagttaacattgccatcaggaaaagtgattcgcaccccaagcgagttgcttttcctttttttatggctattgctttaagaattcatccaccgctttttcaagcaaactaatcatcgcttctctcttttgctttggtgttgtattatcttgcatttcattaaagataggaagtactctttctaatttctgtttatcgatgcgttcatttacaaggtcttgtcctagcattgaaatgaatgtaccaattacaaccgcttgttcttgtttagttagtttcatttgttatcacctcaggttaaaacctttctttaatttcagtaaactcactaactttttttgctattgctttaccatttaaaataactggaacttctataaataaagaatcttttttatttgtaagcctacccataaccttttctagcttctctaacgcttccgcacattcatttgcagcttcagtcacttctttaattccttccattgcttcggttgtatcagcgctgacctcaataattaatttgttattagccattttgtgaatcctccccagattgtttggtttatcgttgaacatgagttatatcagctttcgttgctaacgtttcttctagcatattgacttttctattcaatgcttctatattcgttgaaacattaagtaatgcttgtttcataccatcattatctctttgtaaatcgttaacacttctttctaaattagcaattatttttgttatagattccatccttcatcctcctccaaaataaaaagcacccgaatggatgctttttatttactctaaattaatcgctcttaaagcagctaattttttctgattttccattatatacttatgagattgatgtaacgcagttaaaatttctgttctctttgtaacatcaggaacttcaattaaatcaaacgctgttcttgactctgttttaggcttgtcttcttgtgagtcgtaatatgtaatactctcaatttccaaaccaccgggacttaaagccaatttaaataacggagagttatttaaatccccacctccacgagcacggagtacaatttcatgcaaatgactctcgtcactattccacatgtctttccaagattcttcaaattttgtaccatcataaatattagttacagcccaaccatgcttctcgttatatcttaacttcgcacctaatacccttgtcttttcaacaaaatttttgatgaaatactcattacccaggaagagattagtcataatatagttgaactcagcttcaaatacctcttgccaaatggcatctaaaacacctgtgattctagttcttgctgtagttctacttaaattttttggtgagtaatctctttgctgaattaataactttcgatggttaaaatcgattgcaaatattgtacgttcccatggctcaatgttttcaattgatgtttcttctcgatctgcatctattgatgtttgatctggaatatattgttcatgaagtgcacctacaaacaccccattttcataattaaaatctttatttacacaatagcgtaatttgtgctcgcctggaaagaaccccatgctaaccaccttttgaactacctgcttccaaagcatttcatcatttggaagttgaataatttgataaacttttaaattcaaacaaaccaccccttcgttaaaattggaatacatttcaattttaacagaagatggaatgttattaaatataatattaagaatttaaaaaataatcactgtattttccgaaggaatccaaaactctgaaccatctcccattacgactctataatcaacctctcctctatccatctttatatcaacaacttttgccaactctccattatacactccttcatcagaagttataatttccacttcatttggttttattaaattcttcatatttaccctccatattgatattaatagtccattttattcaaaatgaaaaaagatatacactataatgtatatcttttttattagttataatataaagtacatgaagttttacccttcttccgatcacctaatgctgttacattcatttgcgccaacatgattaagtaactggaagaagagcaaaagctctccttcataacggatatcattcaatcattaccatctgctggtttcggattttatgtgccgtcattacgaaccgtttagaaatttaaaaacaacatagtgaattgtgttttccgccacttctcacaatacaaatataacacgataattccaaaacaaccggcacatttcctgccaaaaagcggtcaaaactctgccactttttttatctgcctcatttcaaacgtttccacttcacttgttagttccacctgaactccgagaaacgactgatccaaattcttaattttcttttcaattagccaatcaggataagctaattgctctaatactgctctatagtaatcttggtttaaccttaatgtgttcggcttttctccttgctgcatttgatattgaaccaatgcttgtaataactcttcacacatcatctgttccacctctcattcattctatataacttgtatacgtcatgtgcatattttataccttccaattacccatatgtttaattgtgtgtttgtgtatccaatatcactagcgcataagaggaaatcgattactgcatcgttcatattttctttctcaactagcttagctaaacttacaagattctttttctccgtctctaataaaatccctagagatatcatccaaattagatttaaatatccaacttcattttcccctatatgcctcaaatcaataagagcgttgtcaaaatctccttctattgtatggatagcttctcctagggaatattttgcaataatatcctctaactcataattaaagcttgataagtaggttccttctataatactattattatccttagaatatctttgaattccctttttctcaccttcttctaaacttttaatatcctctttattttcttgaataaactctttattatattcaattccttctctacatttttcttctataattaaataatctctcattctatttgattcctcctatagatattatgattatttagataaaaaaaacagtgataattcctaattagttctgcatcaatcttacttctagctcactagatcccttaccaacattacccttatagatactttaacacaaactaaaaaatccacagtgtaaaaagttgaacactgtggattcttacatttattttccttgataatgcaccatatcataagggtagtataaagtattttttaaacttgaatcatctaattttaaaatctttacgattgctccgctttcgtaactccaataaccattgtagatatcatttttattttcatgtgagtcataccagcctgtatcactatgccccttataccatttcccctctaaatattctttcaattcctttactgattcttctttattctttgcattgatcacatgataaattgatttatatgggtctacaaagataaattctgtggtattcccttcccaattttcatctttataactaaataaaaaatcaatcaaataatcattcaatttctctttttctaccaacttttctaattcaattatataatcttttgaaacatcaagcattatcccaatagaaagaacccacaataaatctacatatctatatttgccactccacccctttttcatcgcctcaattatttcggggtaaaaatctcttagtacttccataggtcttcccattgaatataaacaattaaatttatcaatacaaattgattcaatatatccataagctcttttaatactacctaaatcatttgatctttcattttttacttttattgctaattctttatatttttctattctattattctgtctatttaaataatcctcgaaataatcttcattttttaaaatatctctcatttcattctccttactcaattattttcttcccagaagaatccaaaatgtttttaaccacattaccatccttgtcaacattaattagtatattttgtacattttcaggattcaaaagcatttcttctcgaattttatctgccatttcttctccaacagttgattccaaacgtctagaaccatctatccatatttgacatttgtcgtccatctttagttttccccaattgtgaactaccaaactttgcttcatcaataacatatttgatctttgattctgcatttgcattttcgtataatccatcaattccttttactattttatcatttatgcctgatggtgcactttttccgactggctttaaatcaaatccagcttcttttaaactttgattattcaataaattgtcactagattttatttcaccataattacctttttgcttatttgtagctgtttttgcatcaaaattatctacagttgtatttttgttactgctaggtttaccgttagccgcacctccaccagaagactggattttttgaatagtatccttagtattttgaatcgatttatcccaaacaaatccaccatgtacaaaaagacttgccccagtagctgttgctgctatatctaatggaataacaattggtgacgctaatccgccagttcctacttctgcgacgatcgttaagaaattagatccgcctatgagcgaaatagcttcaaacatttctacaatggacccggctatttaataatattgtccagctttttctaatgtttctttacattgaaaaacatactatataacatcaattgaagcctatgtgcctgtgaaatgcgaggtacgaaagtgcattcgcttaaataataattttcaatttaaatcaacaaaagagacctcaaatgtgaagtctcttttgttgattattttccataagtaactcgccttttatttgtttattttaagacagataacatggttcattcaaatatatatcctaaagaaaaattttttcctgccgtcataatctagtagaatagattcaattaattcttattaattgcgataaactcactaggaatctcatctgctaaccaagctttttcatttcctaaataaaatttaacgccttcttctctagctttttcagtattaacttctaaaataataggatgcttatcttttcttttccccactaattcagcagttacaatatcttcagaaagatggacatattgtctatacataggtgatagcccatttaattcaatagaatttaaaaagcgaggagatgtaccatgataaagaaatttaggtggaacgccttcttcctttactattttcatgggaatagaatgttcatacaacgcacgaattttattttcttttagctcatgccttttttctcagatttctcaatcattatttttaaatcttctatcttcacatctctccattcaatggattggtgaagtgcgtgtaaaagttgctcaacagacacccagccattctcatctaactccaattcgtattcccacggagcatgacgtaaagcataagatacttattcaattaaatttttaaatgattttgattattgtttttttcacttcgattgtaatctatcatttctttcatagcacattcaacccaatcccaaaagtcatcaaattcttttcttcgttcaaaaccttcacaagtaaaatcatgaataaattgaactttacttcctttgtcgatttcaaaacatgcagtatcatcattatcaaatcttttagcaaaaggaatcagcttacgattaggatatcttttcttcataccagagtatatgttagtagcctgttctgattccattaaaaaccatatatcaaaattaactaaatctaatttgactaataaggtaacagtttaaatgccacctattatttacacatttctctttcccatactctttttccgtcagttaaaaacactgcacttggcggatcatcatagagagaaatttcaaccaatgaacttttttcttgttttaaccaattatatacagtaccttcgtttgtattaggtcgagataaaatattatttactctaaatacagctgcatcatattctgtataatttatatcatcctcatctagtccattgtctgtttcaaaaactgtatctagttctccaataatcctcaatccacttttccattctagtatcatgtcactatgttcataatttattaatgttccaattaaagaatcgtaccccattcgcatcctcttttcttatgatttttatggtctggatggtactatatgagcgccatcaagaccataatgaatcaaccctttagtagtctcatggtattcaccagtattgcggtcataatattttcctattggctcaccaaagtctactctttctctaccgttttttaatagttcaccttttcctgcaaacttatcaagcaattcttgtgctattttattatcgccatagaaaatgctcttattttttccatttgctaattcttgtttatagttcggtgtatcaggaatatgcttctcttgagctcctgctttcacttttattggataaccatttacttcacggtatggacctttaggtacagaatcttttccataagaaggtattcgattactcgcacccttacccccaccagaagactggattttttgaatagtatccttagtattttgaatcgatttatcccaaacaaatccaccatgtacaaaaagacttgccccagtagctgttgctgctatatctaggagtaacgggaccaaccggagtaacaggaccaaccggagatacgggaccaatcggagatacgggaccaacaggagtaacgggactaaccggagtaacgggaccaacgggactaacaggagctactggtccaacgggagacactagttcaaggacagcaaactatttatatgtttatgatacaactaatcaattaatttcagtaggaagtgccgttatcttcaatacaacaggacctaaaactggatcagcattgacacatgtagcaggtactgacaatattgtaattaatatggccggaacatatgtagctgaatttaatttaacagcggtacaggcaaatcaattttcttttgcactaaatggtacaccaattccagggggacgatatggtacatctataaaccgtatccaaaccacaggtaatgttgctttcacagttacaactgtcccatctacactaactttggttaacaatacctctacaacaggaactgtaacccttttaaataatggaggaggagctttaaccgcagtgtctgctagtataagtatttttgagataggataaaacaattcattttttattaggagcacggtagcgattccttcttttgagagccaattataaaaaaataattcaaaatattatatattttcatttaggagtctcgccaatccaatgacataaaaaccatgctaagacattttgggaagttaaattcttgattttcgtaagctaaggtttttctaagttataaaaaagataaaaagtttgcatttttttgtagcaaaaatgtttatttttgttacgtaagaggattagaaaaaacgacagcatgtatattagataggtgtaatatatatgctgtcgttttaaaatatgagtttatattagtattcaatacattagctaaatctattattttttacacttccataatgattggaagaagcattggacgacgtcccgtttcagtatataagaatgggcttaacacttctacaagtttttgtttgatttgtgcccaatttatcattccctcatttagtaaagtagatatacattcatatacaatattctctatttttttcatcagttcttcggaacctcgcatatatacaaaccctcttgtaacaattgcgggagatgagactaattgcttttgtttactatctaaattcaaacttataatgataattccttcttcagatagaatcctacgatcacgtaatacaatatttccaatatcacctataccgcttccatcaacatacacaggttgagaaggaatagttctactactgattcttgcttctcttttcgaaatttctaatacttccccgttatccataacaaaacaattttctaaaggaagaccacactccatagctaattccacatgcttttttaacatacgatattctccgtgaataggcataaagtatttcggctttaaaagcgagagcattaatttttgttcttcctgtgcaccatgaccagatgtatgaatatcacttgttttgtgatgaattacatttgcacctactcggtataactgattaacaatcctgttaatgcttaatacatttccaggaatcggagaggaagagagcacaacagtatctccagggataatttgaatgtagcgatggtttccatttccaattcgagataaagctgccattggctccccttgacttcctgtacatataatggttatttgatgacttgcaatatgttttatttcatgtattccaacgaatatgtcgtctggagcttggatataccctaaatcttttcctatttgaattgttttttccatactttttcctacaactacaattttacgattatacaaaatagaagcttttacaacttgttgtaatctatgaacattagatgcaaaagtcgcaaataagatacgtccttgtgcttctgaaaaaatttcttttatggattgtccaacctttttttctgacattgaataaccaggaacctcactatttgtactgtcagacagtaaacacaatacaccttccttcccaaattcagcaatcttgtgtaggtttgcttctgtaccaacaggtgtaaaatcaaatttaaaatcaccagtatgtacaatatttccatttggagtcgttactactatgccaaacgcgtcaggaatactatgtgtagttctgtagaaccggactttcatgttttgaaattcaacctctatttcatctagaatattttttatttcaacatgacggatactatgttcctctaatttgcttttaatgagtgctgcggctaatttcccagcatatattggtacttgtatgcgcttaaataaaaaagggattccaccaatatgatcttcatgtccatgtgtaatgaacagaccttttattttatctttatttctttctaaatacgtgtaatctggtataacgtagtcaattcctaataattctgtttcaggaaatttaaacccagaatcaataataagaatctcatctttgtattcaacaacatacatattttttccgatttctccaagtccacctaaagcaaaaatctttgttttcccaacttgtaatttctccatgttccaactcctttatatctaattataaaaattcctgattttgaaagaacagtcttcaaaatcaggaacagtatgaacgttatatgttatttcacaatcaacacaggatattttaccctttttgctactttgtggcttacactccctaataccatctcttgtaaagcattaagtccgcgactccctaacacgactaaatcaaaattccctttattcgcataatctacaattgttggtccgggttctccgtgtaagattttaatttcgtaagacacacctttcgataacaacttttcttcaatgggcaagagtctcttacggcgtgacaactctaattcttcttttccttgtgcatgaagaacttcgttctttgcttttgaaaaatcaaccacaaatacaatttcaactttacaatcctttattaaagaagcaattttgaccgcttcttgtgttgcacgtaaggaatgctcagagccatcgacagctaataatatttttttatacatggtttccactcctaatactggattaatgagatgaaacttttctattcgtattattatatacagctaatttttctacgagttttttactagaagaatttaaattctgtatagtaacgatgttactgttttcacgatatttaataactaccttatcaatagccccgactgctgaatcatcccaaacatgggtatttgagaagtcaataataatacttctgtttttaacattgaaatcaaatgcatctacaaaactttctactgatgcaaagaataattgaccttctacatcaaatgttatataggagtcaatttgtcgtttcactacttgtatctttgaaattttagcaacaaagaatattgcacttaataaaacaccagcaattacacctttagataagtcgtgcgttgcaactacgataataacggtcactaacataactactgcatcgctttttggtgcttttactaaataagaaaatgaagaccaatcaaatgtaccaattgataccataatcataattcctactagaacaggcattggaatttgtacaactaaatctcctaatacaatgatgagaaacattaaaaatagtcctgcgatcagcgtagacagtctaccacgtccgcctgattttacattgattacagattgcccaatcattgcacaacctgccataccaccaaagaaaccattgataatattggcgattccttgtcctcttgattcttggttcttattgctatcggttcctgtcatatcatctacgatagatgctgttagtaaagactctaataaccctacaattgctaaagcgattgaatatgggaaaataatttgcagcgtctcaaacgtaaatggtacatctggaataaagaacgatggtaatgttcttgtaatcgctcctaagtcaccgactgttcgtaagtctaggtgcataaaaatgatggcagagaggtcacacccgttcccataccgaacacggaagttaagctctctagcgccgatggtagttgggaccttgtccctgtgagagtaggacgtcgccaagcaactttaagacgagtcagaatgactcgtcttttttgtatgctttcatacctctatcaattgcatttttaaccccttctaaataagaaaatccatattttttatctggctctaagtaagttccttccgcccactcgttccatgcgttaataaataaaaactcgctgttataaaaagagtaagtccgatgaatttgcttgcttaaatatatggtgaacttttcaggggtagaacctacaaagatgctgctattcgcgtttttacgtcgtgcagtattatcccaatcaacaaaagcaccaggaaatgtttttttctttgggagcgatcgttgtaatatatacatccatactttatcgtagtcccaaacgtttaattgcatatcagaatcatatattaccttatttatgtctgaagagctatcatgggcaattgtatagaaaggttcaaactgaatgctagcatcgaatccatttatattaggtagtggaaaactgtttaatgtttcagcaaagtatataccttttaaaccattttctcgcgctaatgcattccagtaattaagcattttttcacaatcaggaatatgtcctggacgataaataatgaatagaggtttatcatctatataaatatatctctcatcttggaaagcctgtaataaataatcaaagtgttccttccaatcagatatatctccgtagtcttgaggcattaatatatgtttatcgagaccatcccaagattttgtccatggttcatttgcccaagaaagacaaaaagggaagtcaggttctttcatctttagtacctcattaaagggtgtttctaatagtctttttcctttaaaccagtaatgataataacaaaaaccatatataccgtatgctttagcgatttttgcttgccactttcttacggagggggtagttaagtcgtaataaaaatcttgataaggttccctaggttgataatgtcctgaaaataaaggtcgtgcacttttagtatttgtccattcagtaaatcctttcccccaccatcgatcattttctttaatttgatggaattgtggtaagtaaaaagcgattattttcaagttatatccccctcgtgtttttcgtagttcaagtgttgggaagttattcttgatttggtgaagcaattttaaaataagagatatgttatctgtttactgttttttttatggtatgtattggattttttaagcttacttaataagagagtattaggtaatttgatatatatctgaaatagaaagtacttttcgtcatgaaatttattacgttgaatgaaaggaattaaattttttgaaggacaaagagggcctgtggtaatcgatttacatcatcaaaaaagtcttgtagctttaaatatttctcataatgattttcaatataagtcctaggtataacggtttctccgtaaaaactactatttctagcatcccctgcaccagtagggctatgaacaaatttgccgttttcataatccgagatggcgcgatgtatatctggaaaagcttgagataaagttttatgccatcctgtttgaattaattcaggatgttcttgaaattgttgacaaaaatcaagaaaatagcgcgcttgtgttgttgcgatgaagattccaccagggcgaagaactcttgaaaattcttttacccaattttcggcagttgcttcggataaatgtgagaatacagaataagcgaatatgatatctaatgaattgtcgctaataaaatctacagggggatgtgggcttgctgttttatatatccctcttcctagtgtttcattacaaagtgtgatcatcgcaggatcgacatcaatgccaagtaaattttgatcagaggcatctttaaataagaagcgtataattcttccccatccgcatccgaagtctaaaactttactttctttattcaagggaactcctaaattttgggcgtattcttttatatggctataaaacaaatatgcttcgtaaagagcatgttcataagaagcacctacaaattgtttttgaatttcttcaggaggaaacataggtacgggaaccccatttatcgttgtttgtgaacaactttgtataaataaatttagaagttcggcatcagatagtgaattaacaagatgatcaaaatcacttcctaacttaaagttattcatttgttaaacctccgaattatatagtgattaaactttattttcttgctttttactaatgaaaacatgtaaaaattcagcatctaaccctagtgatctatccttttgtaaaaaaacaattgtatacatgtttgcatgtgtataaatatattcaatcatatcctgcccccaatcgaacgttactaaagatccattctcatcaatagggtttccatgataaatgggctcttcaatatattcaatcacctctttattcattcttgctctttgcacagtttttgtgagtgtatgataccaagggacagtaaatacatgagcaccgccaggttttaatactcgttctatttctttaaaggctttgtttggcgtcattacatgctcaaaaacgtcttgagtaatgaataaatcaaaagattcattttcaaaagtcatgtcttctaagttctcacatctaataccttgaaagtattggccaagaggataatttctaaagtattgagaataagtatagtttttacagttttttaatagtagctgagtcgtaattcctccaggagaggattcgtgaatattataggaatcccattttggaaaaaatgtatgtaaagcatggattaaagctcgctgccttggtatagagttacatgtagaacataaataatgatctctaagccaatcattatgctctataaatgtagctttcttttcgcaaataacgcagtacccattattgtgtttcaaattgatttccacacgatatccctcctatgttaataaatgcaatctatgtatggaaagtatgatacacgtcaacaatcggcgaaattaaaggaaatgggtgaaagttaggtatctcttaaaattacgattaggagaagggaataattagttggagagaactcccactcgaattaaagtttcactttatgctatgcgatgtatcagcttttattcgtggaaaaatgtatagacttaaaatatccctttcgtgtatgggtacatttcaaaatcctgtgcgtatatttctgtaactaaatccatagtttctttatcataaaagctttcgtatgttggaaatcggggaaagcctggatctgtaatgctaagttctgcatagcttcctgcataaatcatcttgtgagcgcgatgatgatctgaatttgtaagaagtgctaaaggggatttcatcaaatcgtacatgtgttccatcttggtgatttgtgtattaaaatcttctaaaggaatatagcattgaatgaaattttcttcaccagggacgtattgttgactaaaatgtatatctaatgatagggaattggaaccgaatgcctgaacgtaatataaaaattgtttaaatgatattccttgattactatatttatcattataaaaataatgacggatgctctcccattgtgggctagcatatggattgtcagcaagtaataaaaatgagctgacagctcttgtataaggatttcgtacaagtttacaaacattttttttagcctctagaagactattttgtaattgttgaatgtaatttgtactgtttttatacacccagaactcatagtaatgaataaagtcattgtatttctttgcttcagtaaataatccaatttgaaaaaagaaccaattagctaatgaggtgcatccgcttctatgactccaaaatagtattataaatgctaacttaaatatgtacattaacgcttgaataaatatgtacattttccctagcctcttgtccgccacctttcctccctgtggtcgtcaacgcgtctacaacggtagggtaatctattattatttcacttcgttgcataataaagattacgaatctcactttgttcgatttaccccaattccatttaatccgggaaatatttttatagtataactaccatgcgagtggtcacatcctattattctcatttttgtgacatatttcatatttggtttcttagatttaattaatatatttatcttttttattattttctttcaatctattggaattatatgccgtgattttatcttttatgtgctataattgtccttgtaaaatattttttcgagaaggaggtaagttttgtaaatgaagaaaacgaatccttcatttttaggagttgaaggattggacaagcttgaatatgcagagatggaagttcatctttccaatgtacatactttttcaagtccgaaaccatcagattatttatattcagataaacaaaagggtttatacggatttaaatttgaagttgatgaagagtccggaaaaattatgttatttggtttttgctcgtacaatcctataactaagaagaatggttatcattatatttatagagaaaatgaaaaagatatggattttacaatcatcaacatgttaaagagcatcattaaagattgtcattttaacaacaagatcatttgtcactttgacgaaattgaatccattcttattctgaagttgttaatggaatgtaaaaaattatctcaagacgaacaagtaacgacatttcagagagttttgaagggtataaacggaaagtttcataaaaagagtgggacgtggacagaaccccctattattgaattagatatcggtaatggtgaaagtatcggtgtttctaaagtgttgaatggtagtttggagttatttgtgacaaagggaggcaagataaatacatgtcacacatttcggtctaaacctttttggcaaaagacacctattgaatgtgctagaaatgcaaatcttaaatatgtagaggaaataaaagaacaacatataaactgggatattttttctaaaggttataatagggaagtagataaaaataaccacagattacaagataatacttatgtgaagaaagttttaagaatcaatatgtacaattcctttttagcgaaagatttaattcaagttgtgactaagatgtttaaagaaagctttgattgttacccaaattcattttattcagcaggaacattagcagaagctgttatagataaagttttaaatgaaaaagagttaaagaatttttcaattgattctactatagaaaattggcaagaaaaagaagttgatgttgaaacaatcgcaaaagctattaatataagttttgatgcaaatcaaggtgcaattattgaacatgaaaaagttggttatatatcaaacggagctaacactgatataagttctagttatccggctgttatgaggtattgcatccctgatttaaaggatagtacagttcaatcttttgataatattaaagattttaatgaagtccctaaacctagtttgaatcgtgtagttatgcttacatgtgaatttgaaataccacctaatgttagacatactattatgattaaacaaaaaggtgacgaaggaacagtaaatcaaatcagaaggaatgttttaggatttggtaactttatagcttcagctcattataaagaaatagaatttcttttatctcaaatcgaaccagagaaaaggaaagaagttattaaagaaattatagaggttattgttattgaaacgacaggaaaattacatccaatcagtaaagtgattgataccctttgggaaattcgtttaaaattaaggagtgaagggaagcattcggaatatattgttaaattaatcatgaatgcaatttatggaaagttctttcaagctttccaacaatacgcttgttcggaaaacgaagatggtgaacaggaaatatattttgcgggttttgatgtaggatatatgtttaatccaattgtttcttctatgataacagcattcggaagaataagagttcaagaaggtgctttgaatatagaaaagaatggtggtagagttatttcaattttaacagattgcgttaaattcgaaacaccagattcaaatagaccggcttatgattatttagataattgttttgatagtattttaagtgaatttgaaatgcttaatgtaaatgggtggagtcctaaaggctctaaagttttagggatttttgaagaacctgaagagtttaccgaaggattatttttaaatacagcagtatatgagtacaaattacttaatgataaatgggaagttaaaacttctggttaccaaacatttgataaagagttcgaaaacgaatcttatcttatgaagaagttagaacacttcatagataaacctgaatcgcatttctttaagtatggtaaaagagcaggagaatacggtttaaaattagggaaattagaaatcataaattattttcacatcgttgaagatttagctgattttaggcatttaggaataaagagacataaagagttacctttaatatttgatagtttttctttaaagccaaagagatcgtattataaacatctaaatgaagaaattgaattaagtttagaaacggcaaaagataggttgtttgaaacttcacctgtagatatttcaatggaatgcggtggttttaatgatagttttgaatgggaaacctttgataatcgtaaaaagacggctagagaattactaaagataccaaagatatcagaactaaagaaagctaaaaaagaaaatcgattacaacaaaaaagaaaatgcgatagaaacaaaagagaaatattatcagctttgcaaaagcaaataaaagaaaatattgatttattctctttcgataagtttacgatgaaagagggtagtaatggcggtcacaacgcaagggattatggaattgaaaagatgcgtgatttattgaaaatcaaaaatatagaacctatagcttaaagcggacaatagcagttgtccgctttttgtttatatttaaacataaaaaaagactcgctattagcgagtcaaagaagaagaaaaagtcactttataagacgataaagtgtaagtttcgatgcgaaacttattgaaaatcaaaaataaaaacctataacttaaagcggacacgtttaacgtgttaagggttaataaaaacaaacgttagcagacgtttattttcccttagtacttaatataaacaaaatcttgaacggttaaaactttgtttatattaagttgaaaaaataatgtttttgacaacttgattatatcatgcgtcactttcgttatcaatttttttatttttacaaattctaatgaaatcattcaaaatacgcaaaaaaagagtcatggaatcaattccacaactctttcctattttacaattcttctaaccaaattccactacccggaaattcttgattcaatctatcaattacggcttgtgcttcctctcggcttccatagtcacctaataggattctatgagcgttcccggctagacaagcaatccaacatccgtgacccggtaatatttcgtttacacgtttctttacacccgctaaccaatcaaagctgtcaaagtcaccgaagttcacacggtaatatttgtccgcttttgcgacaggtaagtcctgatagttcttcagatttacatctgtaacactttggacaatagcgcggcaaacggcttcaaatcgttcctcgtacgctttcatattccccggattgtttaagaatgcaacctctattaaaatagcgggagcatttgtcccattcagaaccgctaattccttcccttgcttcgctccacggtttgcgatacctagcgctcttaaaattggtaagacgatatggcgagatattagtaacggtaaacctggtgttctaaaagtgtggaacggtaaaggttgggagcttcttattcctgatgtggaatcaattaaaaaagatacactagagcaggttaataaggatattcaacttacaaaagaagaattaaataagaaagtggaagaagcgcaaaatgaaactgctggtcaattcaaggaagtaacagaaaaccttcaagaagtttctttaactattaaaaatgtacaaaactctcaaggtgaaattgacaaaactgtctctgaaatgaaacaaaccaacgaaggttttactaaatctattgactcgttaacgaaaaaaaacggtgagatcactgagaaattaaatacagtagtagagacttccgatggcacaataaagaaaatctctgaggtacagaaaacaacaaatgatctaaagaaaacaactactgaaatagaagaaaaagctggggaaatcatcgaaaagttaactagtgtagaaaagaaagttgataatacggaaattggtatccgaaatctattactagaaacagctactaaatcccattcagtgaagactggagaaaataagcctcatacctattttggtgtagctaaggatgcggttactttaattcagggcaagaatattgctatgagttttttatttacaggtaaggttactgcatggggtacaacgaataaatgggttggtttcgaagtgaaaattacttttacagacaatacatttgcttatcctagctgccgtgtagaaaaccgtctaacactaggtaaacagtataaacaggaaagatttacagcgagtgctgtagtaatggataagcctattaaagagattttagtttacgctttaggacgtgatttcacaggagacgtgttaattgaaaagcctaaattagaagttggcacagtacctaccgcatggacaccggcaccagaagaccaagtaacgaatgaggaattcaacaagaaaacaaccgagattgagaaaagtgtggatggaatcaaagaaagtatcaaaacggtagaaaaaacacaagttgattttagcgagcgtgttactactgtagagaaaacagcagatggtattaaagaaaatgttactagtatacaagaaatacaaaccaaacaaggtacgcaattacaagaagctaaagcgggttgggaaactactgcaaaagctctggaaggaaaagtagaaataaaagatgttgagaattatgtaggtggtttaggtactgtaaacgagttgcgtgatgctgattttaagttaggacagaaatattggttttggaatagtggtaatggagcaactggatctgttgatacgaatttaaaatacaaaggtatgagtacattcgcaattaccgttactggccagactcaagatcgttggtggggacttacaagtcaatttattgagtgtcaggttaacgaagactttgttgcatcaggttatttcaatactgacgggaaaacacctattgatggtggcggtgcatttattgaaattgaatggtggactgctgacaaaaaaactcgcattaaaacagctagaacgaatatcaaggttgtaaatcatacatggattcgtgctgtatgtacagataaagcgccagccaatgcagcgtttgtgagatggcgttattacgttacaagaaatgggcgtttatggtgtgccgcaccaatgttacaacgtggcactatagctacagaattttggttacatccgaaagatcaaacggatgctgacaaaatgatagaagatattgctaatagggtagcaactaaagattacgataaaaaagtaaccgaattagaaagaagtatcgctactaatgaagaaggcgttactatcatttccaaaaaacaggaaagttttattaatgagacctataatgcctatgtaaagaaaacagaatcgaagttacaggtattagatgaagggatcttagcacaaattttaaaagacggtattattacttctattaatatgtcacctggtaagattacaatcgatgctgagaaactgaatattaatgctgatacaatggtgaaatggttaactgcaaaaggcattgatacgaatcttattagaattgatggtgataagataaccattgataaagatggtgtaactgttaaaatgctagacttcctattccaagacgaatggggcacaaaaacaactgcagtatcaagacgaaacctaatagcagatcccgacttttctagtgttacaaagaaaaacattggacataacgattattatggatttgaaggtggatacggtcttacttggaagtcctggggaaatgtcgtaatagaaaagaatacacatatatttgattacgagcaaatggtgaatgccgcaagggtagatatgtataactatccagaagcaatcgtgaataacggtatacatcctggtaacgaatatacagcatcagctcattttagaactgctatgataaatggcgtgcgtaagacaggaaaaccgagaatacacgtatgctgcgttaaattcggagataacgtaagttacgacatattgagtgaacaaaagatggacttccctgagccatctacctattatggagaaatcagaaggtattcttttactttcaaagtgccaacaaactatattccgcaacaacacgcattgattattaaagtttgttctggaaatgctgacatgagacaagggacagcgatttgtgtaagtggtgtaacgctatacagtggcaaatatgcatctatgtataattgggatcgtgctgcagcagaaagagcagatggtattcagccgtttaacgcacttgctgtaggtggtgtgaataataatatatctccagcaccagacggacaaacgtttgatataagtactgaaaaagaagttaaaatctttaggaatatacgagcaatgcagggaattaacttaggtggcggtggattccaacagtggggtcatattcgttttacagacggtaatgctggaccgggtttttatgcgagtactccaagtggttggaaatttaacgcacttggatagaaaggaaggattaaacatggatattaactatatgatgccttttcaagaaggtgaaacgcttccttatatgggaagaatagtagacgtaaaacgaacggaaacaggagtctttatacaagtacctgctgacatgttagataatgcaggggtttccaatgatacgagtaaagttgaggtgtggagggaaatgtctgacggaactattggttttagggttttaacgaaatgtgagttatgtggttgtggagccaaattatatgaattgaacttaggagttgttaaacggaacatttgtgcaaatgattattttaaacttacaggtgaatatcctccacaagaaccgccaacaccaactaatgaaaataacacagaaacagagcaggagcagcaatagctggtctttttttattgcctaaaaaggaggggaattatgacagttgaaattggattaattatcgcaatcgcatcagcattaattgggtatttttcttattcgctgaaccgctcaaaagaaattaaatcagatggtcagcaaggggcagaattgaaagcgaaattagaatacatcagtaaaggtgttgacgatattcgcatagatcaaaaggcaagtgaaaaacaaatgattttatttggagaaagaattacaagagtagaggaaagttctaaacaagcacataaacgtattgataccttagaaaaggagataaattaattatgacaaaagagaatataaaaaaacgattccgcaactggaaaacatgggttgcggttttttctttgcttggataacaagagaataaaactgagaacactgttcagggatacacatcaggtattagacagtacataaaatggtttgaaggttcctatgacagaaaattaacaaaattgtaccgacaaaatatcttagagtacattagttatttaaagaatgtcaaaatgttgaacgccaagtccattaaccacaagattagtagccttgctaaatttaatgaatttctaatacagaaaggaagtcaacaagatcaagtaattttaaaaacagacatgataaaggttcaaactgtctatgcttctccaacccaaattgttgaattagatgtaaaaaagtttttacaaagtgtgttagaggataataacaaacgtaattatgcaattgccactctcctagcatatacaggagtacgtatttcagaggcattatctatcaaaatgaatgacttcaatttacagactggggaatgtattattcgaagtggaaaaggaggtaaacaacgaattgtattactaaatagtaaggtacttagtgctatcaaagattatctcatcgatcgaaaaacatacagtacagcacatgaatctccgtatctttttattagtaaaaagcgagaaaagctcgaccgtacggtcgtcaatcgtatctttaaatcatacagcaatgttattactccacaccaattacgacacttcttctgtacgaatgcaattgaaaaaggatttagcattcatgaagttgcaaatcaagctgggcactctaacatccatacgacactactttacacaaatccaaaccaactgcagctaaaaaataaaatggagctcttataaaggagtaaaggggaaacaatgggagttaaacaattactgtcagaggcacaacgaaatgagttaatggatttatcacgtttaacagaatgggatttggtaacatttcatactttttctaaacatgacttacatttaatattaaaacaccgtagaggatacaatcgtttagggttcgctcttcagcttgcattaattcgttatcctggctggtccttaacagaatataaagacattccacaatatgtagtggcttacgttgcgagtcagttacagattccacctgaagaatttttagtatatgccaaacgtgggaatactttatgggagcatcttggggaaattcgaacagaatatggatatcagaatttttcttctgaatataaagaaactttattacaatttttagtgcaacaagcaatggataacaataataccctctatttaattgaaataacaatatctacattgcgaaaaatgaaagtcattcttccagctatgtatgtgattgaagatatcgtctgggaagcaaagcaacaagcagatcagaaagtgtatagtatactacatgacggtttggtccaagaacaaaaagatcaattagatgcgttacttttaccaactataaatggtaaatctccattagcatggctaaaagatgtaccggcccagccttcaccagaatcatttttaaaagtaatagaccgattacaatttgttcaaaaaattggtcttactattgataccacaaaaattaatacaaatcgtcttcggcagctcgctagattaggatcaaaatatgagccatatgcttttagacgattcaatgaagtaaaaagatatagtatgttagtctcatttttattggagattacacaagaccttatagattacgcaattgaaattcatgatcgtcttatgatgaatcttcaaacaaaagggaaaaaagaacaagacgaaatacagcaagcaaatgggaaaaaattaaacgagaagattttacaatttattactgtatgcgggacactaattgaggcaaaagaaacgggtaaagatgcttttgcagccctagatgaagtaatgtcatggaatgagatggtcgaatctgttgaagaagcaaaacaactatcacggcctttaaattatgactatttggatttgttaaatactcgttattcctatgttagacgatatgcacctactttattacgcagtcttcattttagagcgacgaaatctggagaacccgttttacaagcacttgatacgattcatgaattgaatgaaacaggtaaacgaaaagtgcctcatggcgctcccttacactttgtatctaaccgttggcaaaaacatgtatatgatgatgacggaaacattaatcggcactattatgaattggcagctttaaccgagttaagaaatcatattcgttcaggagatatttttgtatcaggcagtagacatcataaggcatttgatgattatcttataccgtatgatgaatggaacgaagtttcaaacattccaaatggccttacagcccctttaaaagctgaagattatataactgaccgaataaaccgattaaatgaacatttagaatggttatcaaaaaatagcgagaaattagaaggagtagatattagtcaaggaaaactacatgttgagcgattggatagaggaactccagaagaagcaaaagcatttagtaaacttcttcatagtatgttacccagaataaaactgacagatttactaatagaagtggccagttggactggatttcatgatcaatttatccacgcctctaccaatcaatctcctgatcaagaggaacagaatattgtattagctactttgatggcaatggggacaaatataggtcttacaaaaatggcggaagctacccctggaatctcctatagacaaatggcaaatgcttcacaatggagaatgtatgatgatgcaatggttcgcgctcaatctattctcgtgaatttccaaaaggaacaaaagttatcatcctattggggagatgggacaacttcttcttctgatggtatgcgtttatccattgctgtacgttctctacatgcagattccaatccacactatggaacgggaaaaggtggaaccatttatcgatttgtaagtgatcagctatctgcctatcatgtgaaagtcattactaccaatgcacgagatgctcttcatgtattagatgggcttcttcatcatgaaacagatttaaaaattgaagaacattacacagatacagctggatatacagatcaagttttcgctttaacacacttgttgggatttcgatttgctcctcgtattcgtgatttggcagatactaagcttttttctatacctggtggagaagaatatgaaaatgttcaagcacttttaaaaggaaaaattaatgtaaagttaataaaagaaaactatgaagatattagaaggttggcatactcggttcaaacaggaaaagtatctagcgctcttatcatggggaagctcggatcatatgcaagacaaaataaactcgcaacagcacttggagaaatgggacgaatcgagaaaaccctctttacgctggattacatatctaataaagccgtaaggagacgggttcaaaaaggtttaaataaaggagaagcaatcaatgcattagctagaattatattttttggacaacgtggagaatttagagaacgtgctctccaagaccagttacaaagagctagtgcactaaacataattattaacgctataagtgtgtggaacactgtatatatggaaaaagccgtagaagaattaaaagcaagaggagaatttagagaagatttaatgccatatgcgtggccgttaggatgggaacatatcaattttcttggagaatacaaatttgaaggattacatgacactgggcaaatgaatttacgtcctttacgtataaaagagccgttttattcttaatataacggctctttttatagaaaaaatccttagcgtggtttttttccgaaatgctggcggtacccccctttgataactaaaaattcttttgtttttcagttgacatactaccgcaggtcttttttatttcattataaaaattcttttacatttaaattcattattcattttgtccatgctacaaagtaaaatccgtcattataattttatctcgaattcgagatattaatcacaaaattacgtatcggcgtctaacctattgaattatctcgaattcaagataattcacaaaaaatatttgttcgatttataaccataataaattttcattatgaacattatttatctcgaactcaagatttattataagttacttattttttattgtcaataagtccttactttcatttttcttgttttcacttatggttccctaccttaacaaacattttttgttctttcaagtgaacgagcacttttcattacatgtgaaaacctttataaacgcctttatcccagtggattacaatgatttttcaaggaattaaagtaataatattcagaagattaaagagtgttttttcacaccttattttcattcctttacccgataaattttaaaaactaaaagccatacaaatgtatgacttttagcttattgacgtctcaaattttgctttctctacatatactttacgaaatttcatatagcatccaatacgccaaggtactatataacaaaccgcaagagtgtagaaaagaatgccgattgactttggatctagaccttgtaaatgtcttctaaaataagcacgtaaaagaacgataactaaaaatgtagcaataaaagcgatacttttttttgcataaatttgaccatcttctctgacttcatacccacttaaaataataagtggaattgacaataacagtccgatcccagcagctataccaatttgccaaccagcaagttgtatcggtgctgcgtataaagaaaaacctggtaataagaagaataatggcaatagtagtcgtcttcctttattattaattggtcgattcatagagcgcatgcgtctaaatataacgagccctatgacgagtaaaaaaattgtaatactgtacgaaccttgctgcaagtgaatctctccctaaaaatagtcattttcaaaaatactcccctattatactcctaatttttccaaaaatataattattcctctaaaaaatcttacacatcaaatatacttttaggtttgatttactataggaaacaattccgaaagaggaactactctccccacctcgtctttaaacacaatatgctctctagttaaatggcgcgggctcttcactcccgccgctgccgctaatgaaaataaactatatctcatactaataatataattcatgactcgccacttcttctcatacggatctaacgctttttgataatgcggattcgtcgtggctacaccagatggacattgaccagaattacattgaagggccataatacagccacttgccatcaaaaacccacgggctgaacttacagcatccgccccaatcgctaaagcaatcgccactttatctggtgtgattaatttacccgatgcaaatactttaaacttgttacggacaccataatggtttgctgtatcaataaatgtaagtaatgctggaataagcggcagtcccatacaatctgccatcgatttatacgttgcccctgacccgccttctgaaccgtcgattgtaataaaatctgggtaaatgtttagttctttcattgtttttattaaatcttccaaaggctcctgctgaccaattacaattttcattccaactggtttaccgctgttttcttgcaactgttgaataaaacaaagtgtatccgctgcattctttaaaaatgaaaatcgattcggtgaattaatcgtctctccctttcggacgttgcgaacaaaagcaattttctcatttactttttgtccctctaaatgaccaccacgtattttagcaccttgcccaaatttcaattcgaatgctctaatattactttctttcgctttctccatgaattttcccattgaaaaattaccgtcttcatcacggtatccaaataaccctggaccaatttgcgcaacgatactcgctcctgtatgtaaatgttctggaataacgccaccttcacccgtattaatccacgatccgcctgccatttttgctccaaaaccactcgctaaaatataattttctccaatcgcaccgtaagaagtcgcagatgcaccaaacatgccatgtagcttccacggatatttacggttctcaccgactataattgcatcatcttcttcgtacagccaaagattcgttgtatccgctgtcaatttttctcttcttgaaaataacccttctttatgaatcacgtactttttaccttcccgctcttgcgtgagattcacacttaattcctcagttaatatcggaaataatgtattagcaatataatatccagaagcttcaaaatctcgttttgatccaaaaccaagtatttcagagcgatatttcgctaaaaacataacactttgaaaatcataacgtgagaaaggctttccatccgtatcatgatcaaaccaatattgtcgaaattcaggccctatcttttccagtaagtagcgcattcttcctaagtacggatgtaattttaaaatagaatggtgtgttcgtttttttataaaaaatgtaatgataaaaaagacgattaaaagcaacattaaaaatagtaatatactaataataacgagtagcgtttcactcatcccgcttccccctatgaaattccataataaaaggagaacactcgatgtgctctccttttatctttattcatactaacgtagcaagatgctctttcgcgtcatattcaactaaactttcagcgtgtttaattcgatgaacaaagtctggattagcaattaacggtcttccgaatgccgctacatcaatcgttccttcttgcaacgcttcttcggcctctttcggatttaaattaccaaccccaacaatcgtaccatcccaatattttcttactagttgatgaaaattctttccgtcagcaatctcttgcgtataattcatcgttgaaggatggatcatcgttaacccaacctctttaaacatatttatgaacgtttcaattgcaaactcaggattttcccacatataagtaggattatcacctttgaaagcagagaaacgaagaagtgttttattagctccaacagcttctattacagccgccgttacttctttcataaacgttaacctttgttttaaatcaccgccatatttatctgttcgcttattcgcaaactcatacgtaaattgatcgattaaatatccgtgtgcaccgtgaatttctactccatcaaatccagcttcgatcgcatttttcgcagcttgtgcgtattgaccgatcacttcttgtatttcttctaacgtcattgcttctggcgtatcaaacggtttacgaaagcgtggaacatttccctctgcagcgatagccgatggtgcttgtggcatttgaccaccaattatttcatgatgactcatacgcccaacatgccatatttgagcaataatcgtcccgccttctttatgtactgcctctgtaacaggtttccaagaatcgatttgttcttgtgtataaatacctggtactcctgggtttccttttgctctcggactaatgacaattccttctgtaataattagtccaattccatccgcagcacgttttgttagtgataggtaaggatttgaagttatctctaccttttcccccactccacacgtactatatacgctcttttctcaaattcctctcttggaatagactttcttcctccatcataaagcatagcttcatagtattctgctactaccgaaacaggaacaaaataaataacctgatccgttctgaactctattaaaaagaaacaaattgctccctgttcttgtgtatcctttaaatagtcaatttgatgtctacttatattatctaacgggaagcttgtggttttttcagtagatttcgcttcaaaataaacagctcttcctttgtacacaccgtcataatctactgtagatttactttcccatgcacttttagttatattgcctttcttatctgtctttatcacttttattggtgtagggcgcttattaaatactcctacattcgccgctttatacatacggcatgtattgtttaataaaagctcaaatgccattcctctatttgcgtaacccataatacaccgtctctttccactaaaataattattttttacaaattataatcttgtactacctggcttaagaactctcttaccgcgttcttctttcttgcttcgggtttaattacaagctcagttaccttaaatcccagcaattcagcaccttctatatttcctctaagcaagttatgtaaattatgactataatactcatccgttacctcaatcaccaattcaagcttatgaccagcaggaaatgtaagcatttttgttgcttctctatataattcatcttcttccattcgtttattgtgccgacgtagtttttcttcaaaatcttcagatttacttatctttatcattctgtctcacctttttctaaaataagaattttgtataaatctcattaccaaccaaaatcagttggtacatacacttgttgctgtgttctaataatttgacgtaagtctgtttgcggtggcatatgatccgtttctgtcacccgaattaaatatctccattcatgtttagttgcttcgactccacgatgaatatcaaaccaatcaaactcaactggtgtacatgcaggtactgtaaatgcctctaattcgcccgatgcgactttttctcttacttgttggttcaccataccgtatagccttgtgtttggttcagcaggtacatctagctctacaggttgtccaataaattcagttaagcacccttcacctgtaacaagtagatgaaaacggctagtgctcattttttcttgcgcgaatatatgtggatttgcttttgcttccggtcgtaattccgaacctcttggaacaccgtcactatgccaattaggaatcgccggacacataccaggcattaacatatgaacttttgtatctacaacaatatacttgcggtcatgtcgtaaattcatcgctccaatagcagcctttgtaagctctcctccatatttcagtgcatcatctaatgaagcattccataatgctggtgtattctttaatacatcaatacttggttgctcaatctctctatactcaagaacacgaattggatttctattaaactgaaatttagatgttttcatttttttctccctttctattcaaataacgctttggtttagttttctcttatgtcataaccaactatttcagcatcatcaaaattcaagtctgtttcttctacttttctcacttttaacccaggtatttctttttgcaacaaatgtacaacatcatcagcacagtccgaacgactttctacacgggcaattatgatgttcatttgattttccgatacatgatctggcaatataaaatcataaaatattttccttttaattctttcttctactgtgatttctacttttcccatttcctatctctccctttttaataaaattcaaatttgataacaacccaggactccctcatttaagaaagtcctggaaatataattatttaacttgaaccaatggattagcttctccactcacttgtggtaacttaccatcccatttttctatctttttaatttctacaatttctggcgttaaagacttcttaataatctcattcgcttcagcttttcctcttgcttcctcaatggctttctctgcattaattgtagcttgctttttctcaatctctgctttttcaaggttttgttgagcgtctactactccttgaatcgctttcgctgtatttgcgtctggtttaggtgcttctaacgtaacggaatctactaagaacccagtagtatctaccatttttctaaattccttttctatcgctccattaatctccccttgatgttggaatacctcaagaactgaatagttagagaaaacgttcaatgtagctttcttaagtcgagtctgcaaccacccgttctcaatcacatctggagcttgtcctttgaacttgttataaatcttaggaagtttctctgcatcattcatgtaatcataagatagactcactgttaatggcttaccatctttggtttgtacgctgaatttatccactttaaccgtttctgttgaaataggataagctgttacacgtttaaatggtgaaactaaatgccatccttgtcctaaggtttccttttcaattcctgtacttctgttataaacaacccctgcatgtccccctgatcgattaccttcacactcattgctgttagaattccacctgttaaaagactgaaacctactactgctgcacctacgattttctttgtattcattttattcttcctccttaaacatgtttttaatttttaatactacgtttccaatacactcaaaaactcctaatttccctgatacaatccataaaaatgacaacaccataataaacactataattcctacaaataacgagaacattgcatcactcctttctctttatcttcacagcaatccagcgtggtatttttgtatattttaagagtgcaaacatggtagtttccgtatccccattcgcaaatgaccaacaaactcttcccatcattctgtcccacttaaacgttggatcaattttttctttgtatggccataacgttttgttctctttaatagttatatttcccatacctttcctagcttttttaaaccatttgtaatctttattgttacccttgcatgcatataaaccatattgagtgcctcttgcatatcgcattttaaattaatccccttatcctttatttgagatcaagcaaactatttattcacttgctttatccagccatatcttcagcgaaaaatagaatttctaaattatctgttgcaacctcatatatttgatgcgagttcatgatttgtacagttgctctatcacctgttacgtgtaaaacacgagatgcatacacctcatccgttacaacatcaccagaacgatattcgttcggcttacgtcctttttgagcaaatacacgtcttacgctttctgcatcgatttcttctactgttgcatatctacatttattcgaatgattgtagccccaatcactatgtatcgctccttcgcatccccacgatccccataactctactttgtcgttaaaagtatccttaatcactcgtttcacttgtgtaataactttgttatccttcaattcgcatacaacccattgaccagtagctacattcttttcatcaatttgtaacttcattccccatctctccttaattaaagatttatgaattcaaactaatttgctatataagttaacttcctgcgctgcatcatttcttctcttgatggaataaccaactttgaccaaggtgaagcttcttttgccttctttccacattctgatcgttcaatccttagtagctgcttaatatatttgtctaattttttgggttcagttcaataatggtggtcttgtttatattggtgagattgtactaggatgatagaatagatttaactgtatgacgtagggtcggtgctgtcctttctcttttttatgtagagggaaagtaggtgactcctatgatggaatatttactgtctttgctacagaatttattgaaagtatttctaggaattattgttattggttatggaaacaagctagtgagtaatattagcaaaacgcaaaagaacctccctacgccgtcggaagcaaaagggaagttctagaaaaagaaaataaatttatttagtaactacccgccttacggcaatagttaccagaagagatggatccaggcatctcttcttttattatatacccaaggtattactgcaatactactgtagtaataattatatctaatgaacataaaaaatcattgtgtaaacaatgggtgtaatggacaaaagaaaagacaccctaaggtgccttcttccgacttgagcaatcctatagtaatgcgatgtcgattaataaaataatttatataaataattcgctatatctttatgtaccctagctgatataatttataaggaaattattggctaattaataacgcacacatatattagggaggtacataagtcatggaattaataatttcttcatttgtattagtagtaatattctttattctttcgatagttttaagtggtaaaggtcagcgaatagcaaaagaagttttaaaagagcttattaatggtcctgaggggaaaatgttggtaggtttttttggatctgcagcagttacaggagtaatttttgtcatttggcttctattaaattaagcattccagttactcagtctgatacaaggtgtaagaaaattactggataattaaaggtacataagccatgttagaggtaattacggcatttttcttactaatcctccattccattgtttatctcttttcaagtggagaaactaagcaaatagcaaaaaaacatataaaagaaattcttaatagtccggatggagtaataatattaattgttgctgcggcacttttaatcggggggatatatttattatcactatgatttcaaataccttagcttaaaacgtataaggaaattaaaagtatacaaatagcacaattataaataatgatatttataattgtgctatttttcatatttatcatatctattattctttcattattttcaaaaggtgaaactcaacaagaagcaaaagaagttgtaaacgacattgttactggttctaatgggaagatactattaatcgttgctgtggtatttgtaattagagggatatttattgttggtagtattgtaaatgatggctatgaatcacctaaaaatccaagtatgcgaaacgatcgtacacctttaaattgtgctcattatggtggagaatgggacaccggtggtctttttggagaagctaaatgtgtttataataaaacttatgaatcggataataaataatatataaaggccttatcttttctataggaagatgaggattttttatgcataaaaaagacacctaaggtgcctttttctaatgtgtttacatccttaattgattgtaaattgatttgaatacgtgaattcaccacgatatttaattacagcgacataattaccacttgtatagctatctgtgataggtgtttgccaaatttctgttccaggaataaattctggttctattgtttggaatcgttctagggtaccatttgtgtggattttataaatttccatttgcgcaccaaaatgttccctaccaaagtgctgtgttaagtaaaatgtatcaccagttattaaattcccaatcttccaatcaggttggtatgtactttcctctgaattttgtaaatccataatggttttgaatccccaatcatcattaagtggatctgagtaagctgcagctgcttgtgaggtaggcttactcatttctactgcagtaaacccactaaatgttaacgctccaattaatgctatttttcctaatttcattgttgtttccccctgccaaatttcagaattatttaaaatcatatacaaacaataatataattcgttgtattatatttcaaatattttctaaaaaaatccagaataaaaagacaccctaaggtgccttcctcttacttatgaatcaaatttatattttgttcactttattcagtatggtgatgatggtctttgtatagcaatagaaccaaatcacgctataagcattagcggacatcaaaacattcaaaatcggtcttttatgtccgctaatacttaacgtaagttttggttccgttgctacacagacgactatatcctctctactgactgtggttgcattttcaaacaacaaaattataaaatctatttatataatcttaatgatctaaattcctcgtattccctcattctcttgcaaaatgtcgctttcttcatgccagccttatccatgtactcaacagcgttgatctttcctaccttccattccttactatcctcttgcatgtaccaaacattagaattgaaacctttgagattactgttcccttaactacaaagaaaacgctaaacttcatatatacttctgagtatgttatgtaatactaattggtttttatgataattattcgtaagtggataattcactacgcgcctcttctattgtatccctagcaattcttaacgattttaaacatttgtctaatttcgctaaatctgtttggctcgcagcatctccatagttgtctataacaaattgcaagttatccatcgcctttaaaatagatgaatgtagaccctttaattctgttgggggttctacatatcgtacacttgagatgagataagacattttatagaaaacatcgcctacttctgaaacccacgatttgtttatagtccccttaatttctgcatcagcctctaaaattctaaatcgggtcgccacatcagataggtcctttaaataatcatccattacccatgcataatgctgcttgtctaaatgtttataatcacttgtttcggctccttgctttacttctttttgatttcctatattttttttatccgcagtgaattcctcaactgctgctgtaatggtttttataccttttttgctaccaacaagagcgtcgatagttaaaatactacagataaaaatcacaaacatggcaatccacttagcccatttcagcataaaaaaactccttacttaatatatttctcctaaattataatacaggattaacgttcattataaacaacatgtctctttacctaataccttaccttctgtttttccaaaatcgacatctttaagtaaatctatatcatgtcaaaaacgatgtttaaatattgtatcattaaattaaaatataacactataatattttcctatcaagaatatttttccaaaccaaaatcattcatagactcttcttttcaccattaaacctaatttatacatattgaactacccccactttcacttcgtttagaagtgagggattcctaagtaaagagttctatcgaactctaattgattaggctaaccccgcagtccttgcggttagaagccttatcgcttcattctttagattgatacttgcgttaatatccctatcatggtgtgtacgacaagaaggaattgggatgacaaaaggcattgggaactgaaaaacaatgttgatatgttggattttgctgtctttgatggaacaactcattcggctacgttacaacaacaaaatcttgttctaaaagaagttcgcgatggaagagttgtaccatatgtcattacagaaacagagaagaattcagataaacgatccattaccacatatgcttcaggagcttgggttcaaattgctaaatcaggcattataaaaccacaaaggatagaaggtaaaacagtaaacgaatttatcgatatggctcttgtaggcatgaaatggaaacgtggaaaaacagattatgcaggattccatacgatgaccattgatgaatttatggatccgttaacctttttgaagaaaatagcttctttgttcaaattagaaattcaatatcgtgttgaggttcaagggtcacaaatagttggatggtatgtcgatatgattcaaaggcgtggccgagacactggcaaagaaatagagttaggtaaagatttgataggtgttacacgtattgaacattcaagagatatttgtacagcgttagttggatttgtgaaaggtgaaggcgacaatgtaattaccatcgaaagtatcaacaggggacttccgtatattgttgataatgatgcatttcaacgatggaacgaacgtggtaagcataagtttggtttttatacgccagaaacagaagagttaaatatgacgccacaacgtttaatgacgttaatggaaatagaactgaaaaaacgtattaattcttcagtttcgtatgaagtagaggcacaatcaatcggtcgaattttcggactagcgcatgaactaatcaatgaaggagatacaatccgaatcaaagatacaggcttcacacctaagttatacctggaagcacgtgtaattgccggtgatgaatcttttacggatcctacacaagataaatatgtgtttggtgattatcgtgaaattactgatccgaacgaggaattacgaaaaatttacaatcgaatccttagtaaattcggcgagaaacaagaaatgctggatcagctagataaattggtgaaagaagcgaatgaaacagcaagtaacgctaagaaagaatcagaagcagcgaaaacacttgccgaaaaggtacaagagaatattaaaaataatactgttgaaattatagaagctaagaatccaccgacaacaggtcttaaacctaataaaacgctttggcgtgatattagtaacggaaagcccggcattttaaaaatatggacaggtacagcttgggaatcggttgtaccagatgttgaatcagttaagaaagaaacacttgagcaggttaataaaaatattgaggtcacaaaaacagaattaaaccaaaaggtacaagaagcacagaatcaagctacaggacaatttaataaagtacaggaaggtttacaaggtgtcagtcgtacaatttctaatatcgaaaataaacaaggtgaaatcgataagaaagtaactcagtttgaacaggattctaatggatttaaaacttctattgaatcgttaacgaaaaaagatactgacattagcaataaattaaatacagttgaaacaactgtagaaggtacaaagaagagtatttctgatgtgcaacaaacaacaagtgaactaaagaaaacaactactgaaatagaagaaaaagctgggaaaatcagtgagaagttgacgagtgtagaaacaaaggttaatagtgataaagctggtggacgtaaccttttattaaaatcaaatgttaaatatgaaaaaacagactatctaatcaatcaatatactctaactgaaaattcctttgcgggtgaagaatatacctttgtaattaaagggagtgtcccacaaggacagaaatttggaatttggcagaatggtgggtctagcaatgttggatatgcaacaagtgtttacgcgaatggaataacgtatgtaaccttcaaagcagttgcagctacaagtggaaatgaacgaaagttaagcttatataactatccgagtagcactacgaaatctattgtggaatgggttgccttgtataaagggaataagccgcaagattggacagcgccgcctgaagaacaggtaacaacggatgaattcacccagaaaacaattgaaattacaaaaagtgtggatggaattaaagaaacaatcacaaaagtggaaaataatcaaaatggttttgataaacgtgttgctactgtagaaaaagatgcaactaccattaaacaaaatgtctcattaatacaaaatacgcagacagaacaaggaagacaattacaagaggcgaaagctggttgggaaaatactgcgaaagcactgcaaggtaaagttgagctgaaacaagtagaggattatgttgctgggtttaagatacctgagttgaagcaaacagttgataaaaataaacaagacttattgggcgaattagctaataaacttgcaacggaacaatttaatcagaaaatgactatgatcgacaaccgtttcactataaatgaagagggtatcaatgccgcagcaaaaaagaaagaagtatacacaatagagcaagcaaatggacaatttgcaaaagattcttatgtaagagatatggaaacccgtcttcagttaactgaaaagggcgttagtctatctgtaaaagagaacgatgtaattgcagcatttaatatgagcaaagaaaacattacgttgaatgcgaacagaattaacttagtaggtttcattacagcaaatcatattaaaggaaaagttttagaaggggtaacgcttaaaacaagtggaaacagatttgttgaaataaataagcaagacatgaagattttcgatttagataagccacgtggctatataggatttatggaaacagatgatggaagtattcaaccttcattagtccttggttctgataatagaaaatacgctggtacaggatcgttttatatttatcaagtcatgccacgaattaatggagtcgatcaaccttctaaagcgtatgcgaaatttgggatttctaaaggagaaaatgcagaaggcaccaatatatggtcatcatatattcaaatgcagaatgacggtggacatctgtatgcatatgcagctggaagattatactttgataatttgaatgacattgtttttaactcagtgggatgggctccaggatacggaaagtttatagtgacaaccacagagccacattattttaaaaatgactatggtgagtttcattttgatagaaaaagtactggtaacagtatatactttgccaatggcgttaatgatcatgatttaaacatgggaagattaatgctaagagcgagtcttgtatcaggctatgatatgaatttacaaattaaagatgtgtatggtaatggatggcgagatatagagttaagaacactgcgagctaaagaaaatatatctgctacaggacgtatgtgggcgcaagaatttatccctaattcttctcgtacgcttaaaacggacatagaagaccttccattctctgctttagataaaatcaactctgtaaacatcaaacagtatcactttataagagatgttgaacgcttcgagtcaggggaatctattacactaccaattaattacggtatgattgcggaggactctgacgatgtattcaccacaccacagaaaatgtacatatttattcaagcgttaatgtacatatttaagttagcatttatacttaagaacaaaaataaaatgaactttcgttcaaagcaactaaaaaactcgtaatgtacttttggtattgaaaagtacacacaccaaataaactctaacgagtttcattttaaaaattatgcagctttcttttgttttccaaacccattatactcatagacaacacccataatatcaaagatagttttcctctcatatcgatgagatttccgtccattcttctgtaggaggtcgaacaaacggattaaaatctttgttagatcttgggtgtttctctgtatcgcttgatataacagcgatacatgatcttgaatcatcccaatagctttatattcacttaattctcttttgttcttttgcaacagaagtttacgcatcttaaacatcgtagaagaacagataaaaatggcaataagccttccatacacatgacattctaatcgctcttgtttgatattttgccaatgatgaatttgaaataaggatttccaagttttaaaaatgatttctatttgccagcgaagggagtaaaagtcatgtatttgttccatcggaacaatcccttcaggcgtatttgagacatatatgttgatacccgttaatcgtttactcttttctgaaaacgtaataccctttttactttccgtataggcttgtttttttctacgttcctgtatctgtttttctgttaaacgatagataattacgcgcgtgaatagtttttgattctttccaatgtaagcttcttttatttcatatgtttgaccgggttttaaatggttcatgatatgttctaaatcaacttgaatatactgtgattgcttttttacggttccgtttcgaaagtattctggagacggattttttatataaacagtatggtttaattttaatctggatatatagtaggcacctcgttgatccatttgatctaagtcttctaatgaaaaataacctaaatcacgaatgcacaagtcacctggacgtaaggtatctaaacattccgttccaaaggtcttatcattatttttccctggacccacctgaaagtttaaaaattgaccgctatgtaaatcatactctaattgaatcttgatacccgctgtttgtgcgcaaccaccggatccaggatatatactagctaaatgttttgggatttgaaaaatcgtcgcatctaaaatacgaatacgttgaaagtgggtaagcgccgtgcttgaaatagccgatgttttacaaagtttacttttccataatgtagaaaaaatatatttcagaaattcaacagcttttttatcaaagcgtttattaagtccttctggactcataagagtacctgtagctgcatgtaattggctacataatcgaacgagggaatcactcgctgtcctttgacttatccaaataaaaatggtagctaattcacttcctgaaaattttcgttttctttttacaaaacctaatttttttgcgagttcttctaaaaaagaaggggttaaatgacggcacagctcttcagaaaatagttgtaattcatcttgaatcgaaagattcataaaaaacgtcatcctttctagttagctttttagaaagaataacgtttttttacacttgggggtagtctagattcttaagttgatgggcatgtggaacaatctatattttgattaatttttcgttggggttactatatggatttttgatgagattccctttattagaaactttgattatagcgggggttattacaatttcttctagtgctatcgttgcaaaagtgctagttgatttaaaaagaacagggaataacgaaacggagctaattttaggaattatcatgtttgaggatatattccttgctgtatatttatcagtggtttctggcttagtacttggtgatcatgcttcatttttaggtgctcttacctcaattggtatagctttgggatatatgctcttattctttattgtagctagatgggctactccgttattaaataaattgttgaatattagttcagatgaaatttttattatagtagtattttcttctttattctttatcgctggtttttctgaaacaattcatgttgcggaagcaatcggagcgcttctgttaggtttagttttttctgaaacagagcatagtgatcgaattgaacatcttgttgtttcatttagagacttttttggagctatcttcttctttagcttcggtttaggtatagatccgttttcgttgggtggagctatatggctaacgttaggtgctgtactactgacaatcatcgggaactttgtagcagggatgattgcaggaaggcaagctggattatctcataaagcatcaacaaatattgggttaacaatagtgtcaagaggggagttttcaattattatggctaatattggtatagcgggtggtttaatgtcagtgttgaaaccgttctcagcactatatgtacttatcctatctattttaggaccactctttactaaagaatcgaaaaaaatatataaatttttaaataaaatatttaggtgggatacaaaatctacttaaacttaggacattgaactactcaccacttaacgtccttacagactttttgaagtgggagattcctgctaagataaccaatgtatccaccggttatcttagcaggcgctacccgtagtccctacagtgagaacataagtatcttgtacattgacgcaccacactccctactttagtttggttttcgcaacttcggcaagcatggggcgaaagaacgttgaagattttacagttgcaacgtttttctgaaaccaacctcataacttcagttttcgaagagcaatctgtataagtaaatgatagcaaatatgttggcttatgcctatcgatattcatatcccacctaaaattggtgtttcacaccttgacatttttgaggaaggagtcttctgttggaaaacgataaaatctttttaattacttgaattctaagtgtagaaactttgtaatttgtatgaattgagggattgaattccttgtgttaattaacatatatatcgatttgatataaagataggatctaaaaggagctaacaaactgttagctccttttagatcctttttaagtatatcgcacaaaaatcaaatcatacatcacgaaaagtagcttttaagaacccctattttaaatgttttgtctagaaaagtatggataacttcatgaatgggtgaaaatatctatgcttttttattacaagacaaagatatactgtactcataaatgtagaaatatctatttaagaaagattgaaatcatatccaataatctgataggagatgtagctatatgacagtattcaatactaaagaaattaataacacaccttttgaaagtaatatcattccaaaaggaaaccgtaaccgtcctgcatattccatgaatccaagatatatcacaattcacaccaccgcgaatcaaaatgcaggtactgatgcaagagcgcatgctagatatgttaacaatggtggtggatcatccagcgtatcttggcactttacggtagacgataatcggattgtacagcacttaccactaaatgagaatggttggcatgccggagacggcttcttgatgttgcctaacttttttcaaaatgtcctttacaaagggtacagattaatttgaaagagtccttttttatacgtgatgacaagcaacaaaatgctctacaccaacattacggaattctggtactgtttttttacaaacatccgttgcaaatgggcaacgtgtatgaaaacgacagcccgaaggtggatttgctggacttggaatatccccttctagtataattcgttctcgcttcactgttggatctggtattggaacagctgataacaatgctttcgtataaggatgtagcggattggtaaataactcatcacgcggtgctgtctccacaatcgtacctaaatacataattccgattttcgtacataaatgttctactacacttaaatcatgcgaaatgaataaataagataatccccttttctcctgtaactcactaaataaattaataatttgtgcttggatagatacatctagtgccgctacaggttcatcagctacaatgaattctggatttaataccatagctcttgcgattacgatacgctgacgttgtccaccagaaaactcatggggataccggtcaatatgataaggagctaatccacataactccaatacttcaattaccttttcacgcacattttctttcgttgctaatccgtgggccaacattggctctccaagcgcttctccaattctcattctcggatttaatgagctaaatggatcttggaaaacgagttgcatattagggcgatgttttcttaattcatccttggataaagaatgaacatcttttcctttaaacttcacttctccctccgttttttgaacgaggcgtaaaattgtttttcctattgttgttttcccgctccctgattcaccaacgagaccaaacacttcacctttattaatagtaaaacttactccatcaactgcttttacatgcccaattgttctactaaatacgccacccttaattggaaaatatgcctttaggtttttcacctctaataatggttcactcattgttccgcacgctcctcatataaccaacaagctactttatgattttcatcatttacatttagatttggggcttctttttcacatatttccatacaatgctcacaacgcccactaaagtaacaaaactcacctaaaccaactaaattcggaacttgccctggaatagaatatagtttatctattcgttttcccattactggttttgatttcaataatcctttcgtataaggatgttttggattttggaatatctctagtactggggcttcttcaataactttcccgccatacataacgacaacataatcagccatttccgctacgacacctaagtcatgtgtaattaataaaatcgacgttttaaattcttctttcacttgtcttagtagatccaatatttgagcctgaatggtaacatcaagagctgttgttggttcatctgcaattaataacttaggattacaactaagcgcaacagcaatcataatacgttgtaacatcccaccgctcagttcatgcggataagaatggacgatttcatcagcgcgggctatgccaactttacgaattaactcaattgccttcttatatgcttcatttttactaagtaattcatgctctcttaacgtttctacaatttgctcccctacagtgaagacggggtttagcgatgtcattggttcttggaaaatcattgcaatatcattgcctcgtaaactacgaagttctttctctttcattcctaaaagactttttccttcatataaaatgtctccacccactacactaccagattcagcaataagccccataatagataaagctgttacactctttccacaacctgattctcctactacacaaactgtttccccttctcgaaccgcaaagctaacatggttcacagcctttactgtcccctcgtcagtttgaaaatgtgtttgtaagtctttcagctctactaccgctttactcatatcttctcacctaccgtctcatctttggatctaacgcatcacgaagtgcatcaccaagtaaattaattgatacaactgttataaagattgcaaaaccgggcggaatccataaccatggacgcttttggaaatcgattaatgagttagctgcgctaatcatgttcccccatgatggtgtaggtggaacgactccaagacctaagtaacttagtgcggattctcccaaaatagaacctgcaacacctaatgtggatacaacaattaaaatgggtaaaacattaggtattaagtgatatataattttccggtaatcttttattcctaacacatccgcagcttgcataaatgcttgctccctaagtgataaaatttgccctcttacaaggcgtgcaagccctggccaacctactaggcttaaaataatcataatgacatacaaacgataatcagacggtactttccactctgataaaatcgcacccattataataagtagcggtaatcctggcattgacattaaaatatctgcaagccgcataataatattgtccacaataccacgataaaaacctgcaatcgctcctaataaagctccaagtataaccgataaaaccattgaagctaaaccaatggttaatgaaatacgtcccgcttgcataagccttgttaaaatatctcttcctaattgatctgtaccaagccaatgagaaacactaggtggtttgttaatgagcgcaacttgtattttccctgatgcatatggagaaaagaacggaccgataaaacaaaataaaaacataaaaattaatgcataaaaccctacaagtgccatcttatttttctttatctttttaaaagcttgtcgccatggtgatgattcgcttctgctctttttttcttttttttctgtaattactgtaacagtctccatttctttccccccttacttcaaccgaattcttggatcaacaactgcatatacgatatctgctaaaaagtttgaaacgattgttaaacaagaaagaaacatcgtaaatgccatcaatactgtatagtcacggaaatttaatgcttctaattgaatattaccaatccctggccagttaaaaatttgttcaataataattgccccagaaaacaatcccggtaattcaaatgctaataacgtaattgctggtaatattgcattttttaatgcatgcttataaataaccgtcttctccttcaaacctttcgctcttgctgttcgtatgtaatcttgtcttacaacctctaacatacttgttctaaaataccgagttagcgagccgaccccatgcccatcaacttaaggatagaaactctacggttttccattaattgaaatgcgtttcttaaagtggatgtctctttttaaacatacaaaaggaaaattagcaggtcagagaattgaaccacattccatacaaattttcgtgtttagcaatatttatggatgggtgcaccgaaatacagggttacgtcgatttaaaaaggcatattggcaagtagggcgtaaaaatgcaaagtcacaatctttagcgtgcgtgggctcatatgaagcaatggcctttggtgagaacatgtcggaagtatatgttggtgccacaaaaacagagcaaagtaaaattgtttggaacgaaattaaagcgcaaatgaatgggtgcgaagacctaaaagaaaaattcaatattgcgtatgggaaaattgagcatctcaaaacagattcttttatttccgcgctctcaaaagatgcgggaaaatccggggatggactaaatgttcagtgcgggattattgatgagtatcatgcccatcctacctctgaaatttatgatgttctggtgtcaggttcaggtgctcgtccgaatccactcatgatgattattacaacagctggtttcaacttgagccatccttgctatcgtgtggagtatcaatatgtttctaagattttagacccgaacattgatattgaaaatgaagaatattttgtgatggtcaatgaattagataaggatgatgaaattacgaatcctgaagtctgggagaaagcgaatcctattttatgtagttatgaagaaggacaatcttttttaaaaggagaattgcaatcagcattagatgtcccagaaaaaatgcggaatttcctgactaaaaacatgaatcgttgggtggacatgaaagaaaatgggtacatggacatgcaaaaatggaaaaattgtaaagaaactgtggaattatccgaattaaaaggattggaatgtacagtaggtgtcgatttatcagcaaaaattgatttaacaagtatttcattcgagtttaaaaaggatgataagtatatcgtattaagtcatagctttatgccggaagatacgttagctgaaaagagacaaacggataaagtgccttatgatttgtgggtacaacaaaaatggattaccacaacacctggtgcggtagttgattatgaatttatcaaaacacatattagaaatatggaaaaagaccataaatttaagattaaagaaatatgtgcggatccttggaatgcaacgcaattcatgcaagacatggaagcagaagggtatacgatgatagaaatacgccaagggatggcaactttatcaggtcctacaaaagattttagagaacaagtgtatttaaagaaagtcatccacaataacaatcctgtattaaattgggcaacaagtaacgctataacaaaacaggatgcgaacgaaaatattatgttggacaagtcaaaagcaacagaaagaatcgatccgattgcggctgtcattaactcacatgttcgttgtatgctcaattctggtgaggtagacttaaattcctatattttaagtcaagatttctcattctaggaggaatgacatgcggtttttattatttttcatcagtattttagaagatattctattgattacggggttgtccattattgttgggacgactttttttatgaatccgatttacggctggtatctgttaggggttattctcacaatgttgggggtggtaatgataagaagatagaagggaggtgaaatttttgatttttcggcaattatttagaaatcaggatacgacagatttaaaaaatccttctccctggtttaaaagtttatttggctatcaagccgtaagcggtgaaaaggtaacggttgagtcctctttaggtgttccgacggtttatcggtgtattaacatccttgcaaatagtgttgcgatgcttccgtttcaaacatttaaaaagacagcgaagggaagagaacgggataaggcacatcaagtatcgtttgttctagaaagaagaccaaatccttatcaaagcccatttaaatttaaacatttaattgaaacacatcgtaatacatggggaaacgcctatattaatattcattggggtgtggatggaagaccaaaagaattatgggtattaaatccggctgttacaacgcccactgtggacttaaagaccaataaactatggtattttacgagtttgccagacggtacacctataaaaatacctgatgatgacataatccatcttactacattgtctactgatggtttaagggggaaacctcctattcaaattgcaagagagtctatagggagctcacaagcagctcaaaagtttaaaggtaagttcttcacaaacggggcagcgcatagtgggatattaaaaacagaacaaccgttaaatagagaggctaaaaataaacttcgtgatgcctgggaagaagcaaatacaggtctaaataatgcgcaaaggatagccattttagatgctggtttagaatttgagaaggttggaatgcctttaaaagatgcccaatttattgaaggtatgaaatttgataagggcgagattgcaaatatctttaatattcctttgcacatgattaatgagttagatcgtgctactttctccaatattgagcaacaagcgttggattttattcaaaatacattgagtccaattcttattcaatatgaagaagagttttcttataaatcattttcgtttcatgagcaaaaacgatattacttgaagtttaacctaacaagcttattacgtgctgattctaaatcacgagcagaattctacaaaattatgttagatgctggtgcattttcaattaatcaggtgctggaactggaggatatggacgggattggggaatacggtgataaacaccgtgttgacttaaaccatgtatctattgaaatcgcagacgaatatcaattggcaaaagctaatggaggagtgttacagaagggagatgaggacgattaaagacgtatttacaattaaaaatcaaacagattcttcagctgatctattcatttatggtgacatcataaacaataccggatggaaatgggacgattccgatgtgatgccggatgatgtgaaaaatattttagggcagttggatgataaaagtaatttaaatatctatgtaaatagtggtggtggttctgtattcgctggtttagctatttataacatgttgaaacgtaataaagcgcaaaaaactgtttatgtggatggtgttgcagcttctatcgcttccgtaatcgccttggctggtgatcgtgttgttgtcccttctaatcacgggtttataggtaaatccctttcctaaaaaacctaactttatcatacgaggaggtgatggaagtggattggctacagattaaaaatcaagctgaagatactgcttctctttatttttatggtgatatcgtttcttcttggtggggtgcttgggatgatgaggaccaatatcctgagaatgtaagaaatatccttgatagtgtaaaagggaaagacttaaacatctatataaatagcggtggaggctctgtttttgcaggaatggctatttataatatgattaaacgtcacgaggggcataaaacggttcatattgatgggcttggaggttcaatcgcttctgtaattgcatttgccggggataagttgatcattccttctaatgcatacttaatgattcataaaccgtggaatggtatatatggaaatgccaatgattttagaaagatggccgatgacttagatgcaatagaggaagggatcatcaatgtttataaggataatctaaaagagggcgtagacatcgaagtaataagagaaatggtgcaaaatgagacgtggctaaacggtcttaaagcaagtgaatattttaacgttgaagtggcagaagaaaatactgcggttgcatgtacaagtaatctgtttaaggaatacaggaataccccaaaggcatttaaagagccaagaagagaaccgatgcaaaaaagtgaagaagaaaaaattaataatttgatgagagagatagatttaatctaactctttttttattgctcaattttaaggaggaagaaagatgccaaaagaattaagagagttattgaataagattcagaacaaaaaagcagcagcaagagagttattggctcaaaaaaagcttgaggaagcagagcaacttacaaatgaaattaaggatttgcagaaggaatttgatattgcatctgctctttatgaagatgaaaaaaacaatattccaacagaccctattccacaaccacaaaataatacagtaaaacctgctgatgcatttgttaatgcaatgaaagcggctgtagggaaacataaacttacagatgacgaaaaggaagtattaaatgcaactacaatgacagaaggtgttccatccgatggtggtttaacagtaccaaaggatattcgaacagctatcaaggaattacgtcgtagtgctccagatgcacttgagaattatgtaaatgtagaatctgtatctactcttactggttctcgtgttattgaagtagaagcggactacattcctttcgataatattgatgaagcggcagactttccagaaatggaatcaccaaaatttgaagatattcaatttgctgtaaagaaaaaaggtggaattttaaaattctctaaagaattactcgcagatacagcagaaaatattcaaggatatgttaggaaatggacaggaaaaaaatcaaaagcaactcgtaatgctctgatattaaaagcaataaatgataatttcggtacaacaaaggttccggttagtaaggtagatgatttaaaggacattttcaatgttaaattggatactgcgtttgaaacaacggcaattgccatcatgaatcaagatgcttttaattatttagataaactgaaagattcagatggtaagtacattttacaaccagatccaacaatggcgacgaagaaactgttatttggcaagtatccaattgttgtattaagtaataagacgctaaaaacagatagtaaaacaaagaaagtaccaatgtattttggtgatttaaaagaagcgataactgtttttgatagagaagcattatttattgaattctctgagcaagcattagatttatgggggaaagatttagttggtatgaaagttagagagcgcttagatgttaaaccagttgataaaaaagcgttagtagtgggagagcttacattagcagaacaaacacaagcataagaggggatatcccctcttttttaggaggggtttcatgttaatagatttaaatttggcaaaaaaatggctgagattagaagaagaggatatagaagaggatgatatcttagagcttttaattgataatgccgagatatatgtaaaaggatctgtaggtaagcattacaatgctactgaggataaccgaaaacaagcgcaaaaaatcgcattagttttaatcacaaattggtatgaaaatcgtgatttttctggtcaagtagatgaaaaagtacgatataccattaagagtatggtattgcaacttcaattaagtgaggaaacagcatgaatccaggaaaaagagataaaagaattatgattgaacataaaactgaaaggaaagacgatgagggaaacgcgctaccagcaggctgggaagtcttttctaaagcgtgggcgaaggctgaaactcccgtaggttcagggtttaattctgaagtttttaagggaaatgcagaatttgttattaagttaataaattttacaattccgtacagaaaaggtgttcattctgatatgcgtgtgaaatataaagggaagctttttcaaattaaatcagtgattgatattgatgaaaaacacaaagatatgtgtttaatctgtgaggagcgatctaattggcagaattagaggtcttcggtatagaagaatggattcgtgaattagaaaatttaggacaggatgtcccaaaaattacaaaagaatcattaaaagctggtgcaagggtatttgaagagaagttggaatttaattctccagttggccccgaacctaataaaccaacactaaaacaaccgtggtgggatggtaaacacgcgaagaacgctattgaagaaggaaaggttgtaaaaaaaggtggttcttatttcattgaagttggatgggataaagcggatcgctctcctcacttttatatgaagtttcaaaactgggggactagtaaaaatccaaatcctccacataaaggttttgcagaaaagactttaatccaaagtgaaaaagaggtcttgagagttatggaaagagaatttatgcgtagagtgacaggccgatgagaaattttaataaggaaatatttgatgttttacgtacagatgtagttattaaatctgagttagcctttgataactttaaacgtttatattttttagttgacatattaccgcaggtctaaatttgactatataaattattttaaatctttatcagaaattggaaaaatatataatagttatgtgtggttataagtgaagcttatgaactcaatgaatcataatattaatttatataaaaaaactttaaaaaatcgaaagaaatatgaattacctgccaatatatagtgtaagacaaaggagggctggaatatgaagggtgaaatagattacgcacatttaatccaattaactttatcaggaaataaagaagcatatagcaagttgtatgataaaacgattcaagaaatatataaaacagcacattttttaatagaggataaaacggatgtagatgatgtcgttcaagaaatatacatacaactatatgaatcgcttcgtaagtatggtagcgagaagccatttcgtccttggctaattggacttgcgattaaacaaattcactcttatagaagaaagaggtggatgcgactacgaattataaaaaaagcagaagagcaaagaaagtcagtgcaaattgatttttctaacgatgttgtaagtaaaatatcaaaccaaaaactaattgaactcattcataaattaccgtataaattgaaacaagttattatcttaagatacttacatgattattcacaagaagaagtagcacaaatattacatattccaattggtactgtgaaatctagaattcatgcggcattaaagaaactacgtcaaaaagagcaagtagaagaaatctttttaggagaggtagggaatgtgaaatgagtttagattgtagagttagggaatctatacaagaagaagcaaagggtattgttgccccgccggatttaaaagaaaaagtaattgtacaaataaaaatgaagcacgggcggagtaagaggaagaaacgccttatcgcaggagtacttgcagcagctcttttaatcccgacgacaggttttgcgtaccaatctattatggcggatggtatatatggatcttttgagaatttaaaaaacatgccggagcaatgacattagaaacgtatatgcgttttaatgcaaaattatcagaagcgaaagatgaaatgggttcgaaggaatatgaagagtttacaaaagaactgaaaaaattaactaatgcaaagtttgcgtacggagattcgaacggtaatattgattatgatcaattattaccggctaaaaaagaggaattgaaaaaggtggtaatggagcttcatccgtattttgataaattaaatggccataagtctagtaaagaggtattaactcctgaagagtatgaacaatatatggaagcattaatgtcatatcaaaccgttttagtaaaaacgaaatcgagtggggggataacaatagaagaagtacctgaagcgtacaaagaaagatttattaaagcagagcagtttatggaatatgcaaatgaaaaggtgcaataattagaaaagctcatagccttcttagctttgagcttttttattgaaacaaaaaagagtgttcaattatactttttcatatttgcattatctttttgtataaaacaatctaaaagggaataaccagctattaaactaattatcgtaacaaaagttgtatttattagaataatattaactaaataaggtaggtattctgcaagtggtgaaaagagtagtgctggggaaaaggaaatgaatagtgtaggcactgtaatagcaataaatttatccggttgaaagctccagttttgtttacttgtttcgcgattaatagattgaaggaatcgtaataaaatgccaactataagagggaagagtgtaaagtagaataatcttggataaacgttaaagttcacttgcgtgtctgtatctaaataaaattgaatttttactcctacaaataataataagacgataaataatgtaaagcagaggtatagcatcactttttgcattatattccaccatcctttactcaaaatatattcaaaaaaaagaagagatatacaataactactgttgtatatctcttcttttactgttagttaatagtggagtttgctttttcttgcttcgtgaaataatcaataatgcccattgcactaatttctatatctagatgtaaaatattataaacggaatgatctgatggaacgtttaactttgtaagatgagaagatattttatccattaacaaagtttgtaaagctttagtcgcttcatcgaaatcattatacttttcaaagacttccttaccagtctgaacgaaaataggtagccaatgttccagttgattgtatacttctgtaacatgagaggatgcgccgtaatgaccgaaataaatagtatctacatccatactttgaatatgatttttagaagcaatcatcgcatctggttgaaattgtgaaggggacgttgatggtagatacagttctacaccaacgtttgcgagttctctataataaattccaattgtatcaccagtgaaaatcccgtttgttaatgaatcgtgaatgctaatatggtgcttagcatgccccggtgtatcataaaatgtaaggatacgttcttcggcaatttttaacgtatcaccatgttgtacaatacgaacacgttcttcttctataggaagaattggatcaaatagtttatcaaaatcttctttgtatacagcttttgcacctaaaatgagttttgttggatcaatcatatgacgagcaccacgagaatgcacatataacgtagtatttgggcacttctccatcattaaaccagctgcgccagcgtgatctaaatgcacatgtgtaacgataatgtttttaacatcgtttaaatcaatatgtaattgttgtaagccgtctaaaatatacggaagagaaggggctgcacaagtttcaattaaagtaatatcgtcacctaataaaacgtacgtacctgttcgttcattatgctgtaaatcgaaatcatcaataagatataggtgagaagataattgctctacttttttcatatttaccactcctcgtatagtatgtttaaacttaatttttttactttcatgagagacctgtaaaattgatactttcgatggtaattacattgtcgccttcacctttcacaaatccaactagtgctgtacaaatatctcttgaatgttcaatacgtgtaacgcctatcaaatctttcccgagctctatttctttgcctgtgtctcgaccacgtctttgaatcatatcaacataccatccaatgatttgtgatccttgaacctcaacacggtactgaatttctaatttgaataaagaagctattttctttaaaaatgttagtggatcaataaattcatcaatggtcatcgtatggaatcctgcataatccgttttcccacgtttccatttcatgcctactagggccatatcaatatatttgtttaccgtttccccttctattctttgcggttttataatacctgacttagcaatttgaacccaagctcctgaagcatatgtggtaatggatcggttgtctgaattcttttctgtttctctaataacatatggtacaattcttccgtcacgaacttcttttaaaacaagattttgttgttgtagcgtagccgaatgagttgttccatcaaaaacagtaaaatccaacatatcaacattgtttttgatttcccactgccttttatcatcccaatagtcctgcggctgaatagctgcaacgatttgatctgttttaaaatccacaacatgcaaaatgccgcttggtgttctcatctgtatctctccctataacgaacagttgctttaacgtctggtggcatgatatcaatacgattttcaccacgtattacagttggaaaattactgaaaaaatcttttaaattaatggctttttttccgttaatggttacaagacttttttctttatcaattataattttatctcctgtttcaaaaatgtaaggtggattattttgagtatttaaattgactttccaaaatttcaaatctgaaacggtcattgcttctactggtggtacatcttgccattgcataatactaatctggatttgtgctgctttttccatgtgatcgtttttttcatccgtccaccgtgcaaagcgctctgaatcatccttctctgtccctggcaagaattttgaaatatatgcttcccatacatttcccgttctagctatccacaatcgaccaaaatactgattccatgtattcggataatcaccactctcataaattaaacctgttttccctggcttattatcatatccaattaccatcgtcccaaagttttgttcagcttgccaaaacacatcagacatggcaattttggaaagaaccttgctattttcatccaatatcgctatctcaactcggcccatttcattaatttttttactcttacatgtaacatgggcttgcataataaaatcttgtactggacccccaggtatattctttttaacagctgcaccgtgccaccctttccccgcactagtaccaaaatcagaacaataaaattggtatttatctgacttcatttcaccaattggattgccatcttccattgaactgactttactccatcctacagtggtagccatttcgtcccatataagtctttgatttctttcaacgggtaattgctctgttttcaaaggataaccaattctaaagtaatctcgattatatggatactcaccaaaccacacatctaaaaatgtacttggtttctgtgcttcgatttcaataattgcaggtgcttctatattcccttgattgacaaaagaagcagtgacttcagtagaaccattttgagagaacgaatgagtattttgttttcctaatttatatggcattggacaaacaaaagtaataacccctttacctctattaactatttcatccaggtctacagaaccatcaattaatgctagatacgtcctatctaattcatcatcaaaaacaagttcagctggttgctctgtatatagccaatccgctaaatcttcttttaccttttgtaaatcagccatatcttttgctgccttaattacaagaggaacatcaatacgacgttcctccgtttctgtatgaagaaaaagagcccctgcgcgatgagggactcttactaattttcttttaactggagcccaggaagggcgttttcttccaactagcatttgaatataatcttttctgattttattaaaagtaaaaccgagtttccccaacttgctcaccacccttaaaattccgctcttcttttttggtcacgattttgaagctttgtcgtatatgcgtaacttccgttcgctaattcttttccatctaaaacgtttgtcatatttaccgttacattcagttcttgttctctacctgatctatccgagaacatagtttttgctgtaggtgcgttgttataaggtgattgtagttgcgtatacccattgaaatcagcaagtgtattatgcgggatactataatgcgaagtttggaatccaaaatcaaaaacagatggcatattccccatctgtttcttaaccgttccaactacattttttgctgcatccacaacaaatcgtttccccttatccataccaacgccaacaccttctggaactgcgctaccaactggaatcatcactttagatggactgttaatttctagtgctccagaaatagtctttttaatctctccagcaatgcctttcgccttactatataaaccatctgtcgcatcatccaaacctttttcaagaccttctataatggatttaccaatggaacgtagatttatagtgctgaagaatttttcaactgtattccacttatcttcaatatcgctctttatttctttcattttatcaacgacagcttttttcttttcttcaaatttccttgaaactgtattttttatctcttctaccttgttgcttgcggaagtttttgtttcttcccaccattttgttatacctgaccaagtttctttcatcttttgaacgacatcatctttcattacttggtatttggcatattatatggttaagtcctcgatctattagtattcgtcagctccacatgtcaccatgcttccacctcgaacctatcaacctgatcatctttcagggatcttactagcttacgctatgggaaatctcatcttgaggggggcttcatgcttagatgctttcagcacttatcccttccgcacatagctacccagctatgcccttggcagaacaactggtacaccagcggtgcgtccatcccggtcctctcgtactaaggacagctcctctcaaatttcctacgcccacgacggatagggaccgaactgtctcacgacgttctgaacccagctcgcgtaccgctttaatgggcgaacagcccaacccttgggaccgactacagccccaggatgcgatgagccgacatcgaggtgccaaacctccccgtcgatgtggactcttgggggagataagcctgttatccccggggtagcttttatccgttgagcgatggcccttccatgcggaaccaccggatcactaagcccgactttcgtccctgctcgacttgtaggtctcgcagtcaagctcccttatgcctttgcactctacgaatgatttccaaccattctgagggaacctttgggcgcctccgttacactttaggaggcgaccgccccagtcaaactgcccacctgacactgtctcccgggtcgataagacccgtaggttagaatttcaatacagtcagggcggtatcccaccagcgcctccaccgaagctagcgctccggtttcaatggctcccgcctatcctgtacaaactgtaccaaaattcaatatcaggctacagtaaagctccacggggtctttccgtcctgtcgcgggtaacctgcatcttcacaggtactataatttcaccgagtctctggttgagacagtgcccaaatcgttacacctttcgtgcgggtcggaacttacccgacaaggaatttcgctaccttaggaccgttatagttacggccgccgtttactggggcttcagttcagagcttcgcttacgctaacccctctccttaaccttccagcaccgggcaggtgtcaccccctatacttcgccttacggcttcgcagagagctgtgtttttgctaaacagtcgcttgggcctattcactgcggctttccgttaagaaagcaccccttctcccgaagttacggggtcattttgccgagttccttaaccagagttctctcgcacaccttaggattctctcctcgcctacctgtgtcggtttgcggtacaggcaccttttatctcgctagaagcttttcttggcagcggggaatcaaagacttcgctccataaggagcttccccatcacagctcagccttcacgataagcggatttgcctacttatcagcctaactgcttggacgtgcacaaccaatcgcacgcttcttctatccttctgcgtccctccattgctcaaacgataaagaggtggtacaggaatatcaacctgttgtccatcgcctacgcctgtcggcctcggcttaggtcctgactaaccctgagcggacgagccttcctcaggaaaccttaggcattcggtggacgggattctcacccgtctttcgctactcataccggcattctcacttctaagcactccaccagtccttacggtctgacttcactgtccttagaacgctcccctaccactgataccattggtatcaatccgcagcttcggtggtgtatttagccccggtacattttcggcgcagagtcactcgactagtgagctattacgcactctttaaatggtggctgcttctaagccaacatcctagttgtctaagcaactccacatccttttccacttaatacacactttgggaccttagctggcggtctgggctgtttcccttttgactacggatcttatcactcgcagtctgactcctaaggataagtcattggcattcggagtttgactgaattcggtaatccgatgaggacccctagtccaatcagtgctctacctccaagactcttacacttaaggctagccctaaagctatttcggggagaaccagctatctccaggttcgattggaatttctccgctacccacacctcatccccgcacttttcaacgtgcgtgggttcgggcctccattcagtgttacctgaacttcaccctggacatgggtagatcacctggtttcgggtctacgaccacgtactaaacgccctattcagactcgctttcgctgcggctccgcctcttcagcttaacctcgcacgggatcgtaactcgccggttcattctacaaaaggcacgccatcacccgttaacgggctctgactatttgtaggcacacggtttcaggatctctttcactccccttccggggtgcttttcacctttccctcacggtactggttcactatcgatcactagggagtatttagccttgggagatggtcctcccagattccgacggaatttcacgtgttccgccgtactcaggatacattcaagagagaacgaagtttcgactacggggttgttaccctctacgacggacctttccaggtcgcttcgtctacctcgttcctttgtaactccgtatagaatgtcctacaaccccaagaggcaagcctcttggtttgggctatgttccgtttcgctcgccgctactcaggaaatcgcatttgctttctcttcctccaggtacttagatgtttcagttccctgggtctgtcttccttaccctatgtattcagataaggataccataccattacgtatggtgggtttccccattcggaaatcttcggatcaaagcttacttacagctccccgaagcatatcggcgttagtcccgtccttcatcgactcctagtgtcaaggcatccaccgtgcgccctttctaacttaaccaaactaaaaagtaattctacacatgtatgactaccaatatatcctgctccacctgttacaagtattgccataattatagtcctccatatttcattcattataaacttctcaaagtatatcacatatttcttatcctatgtttaacatgcgaacacagaaacttacattttatcccataataattttataacatatacgattctaatcaggtaataaaaaaatgccacataataaaaattatgtgacgtttttttattaaattacgtaacaatatacacttagaaaatgcgcaagactacctaataatacaaaaacatgaaaaatttcatgatgccccatatatttaaactctaaccattttggctttgttccataaataaatccaccaattgtataaaaaatgcccccaagtactaagaaaataatgcctcctgtacttaaattctcagctaacggtgcaaagaataaaacaattaaccaacccatcgtaatataaattgctgtcgataaccaccttggacaactaaaccaaaacatcttaaatacaatgccacaaatcgcagttgcatagactaaacaaaataatagcaaaccacttgctgaatttaatgtaattaagcaaaagggtgcatatgtacctgcaattaatataaaaatcatagaatgatctagcttcctaaagaagtatataacacgttcatttgccacaacactatgatatacagctgacgccgtataaaggaccatcattccaataccaaacaaaataacagctgtaattgcagcaaatgatggcatcttgatagaaactttcacaagcatagctaataacgcaataaatgataatatcgctccacctaagtgagtaaatgcattaactggttcccttacataagtattcataataacacccctcatataattacatgtagttttgataactacatgtaattatatacacatttctttttaaggtcaacatttacaattcatttgtttcgtaataccatatttaaagatatattaaacattaagttccactaagttataaaagtgagggattctacgtggaaaatataaatgaattacttaagacattacatttagaaaaaaacattaaacttgaggatattccaaatgttgacttatatgtagaccaagttgtccaactatttgagaatacttatgcagatacaacgagaactgatgatgaaaaagtattaacaaaaacgatgattaataattacgcaaaagggaaactattcatccctatcaaaaataaaaagtattcaaaagagcatatgattttaattagcctaatttatcaattaaagggagctctctccattaacgacataaaaagttcattagaaactataaatgactccttattaaatgatgattcattcgaattaaatacgttatacaaaaattatcttgctcttactgaaagcaatgtcgaaagctttaaacaagacgtaaataaccgtgttacagaagtaaatgagatttcttccttagaagatacaaagctagaaaaatttctactactaacatccttcgtgactatgagtaatatgtatagacgtttagcggagcaactagtggatgatttaaaagaatcataaataaaaaactatccacctattaaagtggatagttttttatttacttaattgcttcatgaacttttagttgtttccctttaatcgttgtagtcttcatgactttcaagataagtggtccttttccatttaatatttcaacgtaagaaacattatcttgtatcgtaataatacctatatcttctgctgtaacacctttaattttagcaattgtaccgacgaaatctaccgccctaattttctttttcttcccgccattaaagtacagcttcataatgcctttgttgatatctgcatttttatctttctttataattggtttagcatgtatcttttcttcaaatgcagctttctctttcataacttcttcttttgaaggtccaattgcctttggaatttcaaatccaatatactcctcaatctcttctaaaaatctattttcatatggtgttataaatgtaatagcttttccactatttccagctcgtcccgttcttccagtacgatgtacatagctttctttttcaagtggaatatcataattaataacatgtgtaatattatcaatatcaattcctctcgcagctacatctgtggctactaaataacggaattttccttttctaaaatcatccatgacttcaaaacgatcttcttgtaccataccaccatgtattttatcacaaggatagttagctcgttttaattgtctatatacatgatctacattttcttgtgtacgacagaaaataatacagctatcaggattctcaatcgttgttacatctttaagtagtgaaagcttctcgtcttctatcacctcaaaaagagtatgttcaattttatccgtcgtaatcccagctgctttaatttcaatatgaattggtgaattcatatatgtacgagacaatttctcaacatcttctggaagtgttgctgaaaataacatcgtcattctttttgtaggtaattcatcaataattgcctctacttgatcgataaagcccatatttagcatctcatctgcttcatcaataactaaatacttcaaacactctaaagaaagggtacccttctcaatatgatccaacacacgaccaggagtaccaactacaatatgtgtcttttgctttaattctaatttttgacgtgcaaatggagatttcccataaactgccgcagcctcatgcccatcaacttaaggatagaaactctacggttttccattaattgaaatgaacatggcaaagcgtttgtaaattagatggttctaatcgtttcgaccaatcaacacgaataggaatcatatgatcaactacatcacctatcttaatgatatccttgcttctacattgaacacataagccatgatctctacgataaataagcccacgcatctctctccattgtttggagttgtaaaatgaacgtgaacttttgtttcgaatatgtttatcgtaatattttacgatttctttttccttttcgatatgtttagcacaatacttatcccgtgttagttcattgcaacctaatgacttgcacggcttgaatggtttacttggcaccttccatcctcttcctcaatcgtttcatttcatcctcgatggccagattctttttattaatccgttcatgacacttagctatatccgcttgatgcttacgaatcttatcgttcacatatacagggacatgctcatgttcgcaatgaggacatgtgaagtaacacttctcaatgcgattagaaagctgtgctacttttggttgcatattgtaatcttcattgcagttagaacagtagactttcatctatcctcacctcatttaaaagaatattctaattatatatttacaaataaatacaaattgttataatagaattaacattgccatttggaaaagtaatttgccccccaagcgagtggcttttcctttttttatagctatttttctaagaattcatccaccgctttaccaagcaaactaatcattgcttctctcttttgctttggtgttgtattatcttgcatttcattaaagataggaagtactctttctaatttctgtttatcgatgcgttcatttacaaggtcttgtcctagcattgaaatgaatgtaccaattgcaaccgcttgctcttgtttatttagtttcattttttatcacctcaggttaaagcctttctctagtttcagtaaactcactaacttttttagctattgctttaccatttaaaacaactggaacttctataaataaagaatcctttttatttgtaagtctacccataaccttttctaacttctctaacgcttccgcacattcatttgcaacttctgttacttccttaatcccttctaatgcttcagttgtatcagcagttacttcaataatcaatttgttattagccattttgtgaatcctcctcatattgtttaattaattgttaaacatgagttataccaactttcgtcgctaacgtttcttctaacatattgacctttctattcaatgcttctacattcgttgaaacattaagtaaagcttgtttcataccatcattatctctttgtaaatcgttaacgcttctttctaaattagcaattatttttgttatagattccatccttcatcctcctccgaaataaaaagcagatactcagctacttgatcaatcacaacttgacgaactatcaaatgaacttcctaaatcatacgatgaatgcgatgaacatgaagttgaatgattactattatagccaccataatctgaactagagcttattacacttgctgttgtcgtttggattaacaaatcattatttgtactttcagcattcttttttatattgctttgagcaactgccttcttccgtttctttcttttgaaaaagaacatattttttcacccccttaaaaataaaaaaagcacctgctatggatgctttcccttcaatctttcattatttgtttccactctaaatacggaaggaacggtcttttgtcttcttatactaaattcttcaattgttgctatatgctgaggatttaaattaaattgcatcttactccctgtttctatatctatttgtggaacaagaataaacttattgtaaatttccccatccttatctataagttccttttcaatcaaaagactaggctggattggcacaatatattcatttccattggataaaataattttagaatagccactcatcctgattaccacccttgctccataaaatgactgacttatattacattgttgtatacctattttcactatttatattagattatttgtacttttaatacatattaattctaaaaggagtacttcatgaagtttgcacactgtttgttatttatttttgctcttctcatacttatgtttatgtggttcgcttagtaataaaaaagaacatccaaatggatgctccttttatggacggtatcatttaatcagtaccatctgctggtttcggattttatgtgccgtcattacgaaccgtttagaattcaagaaaaacatagtgagttgtgttttccgccacttctcataatacaaatataacatgcttttataaaaaacgtcggcctttttcctgccaaaaagcggtcaaaattctgccactttttttatcctcctcatttcaaaagtttccacttcacttgtcagttctacttcaaccccgagaaacgtctgatccaagttcttaattttcttttcaattagccaatcagggtaagctaattgctctaatactgttttatagtaatcttggtttaaccttaatgtgcttagcttttctccttgctgcatttgatattgaaccaatgcttgtaacaattcttcacacatcatctgttccacctctcattcattctatataacctttatacgtcatgtgcatattttataccttccaattacccatatgtttaattgtgtgtgatgtgtagcatcctcctgcgattagcaagagggtagctactgcccatttcgggtacgataggtaagaatttgatgttatctccaacttttcccccgcctcacaccgtacgtgcgactttcaccgcatacggcgttccatcaataacttttgtattattaaatagtaaatagattcatgttggatcgtagtttatttaccttctcaacctgcttatcactaagcataagctgtttcattagtttttcgataaggttcggttttgtagcatgaagcaatctgtgtgctaattcatgtacaataatgagatttctgtaattatcatcgccaccatcagcccgccttttcacatgatggcaacgtaccatttgggggtagaatgccatctcaacacctgagatttcacatcttccttgtgtttgagcgaagcgacgaatacggttatcattaaactcaatgctacggttgggaacaaaattcctttcaagataagcaaatgcctttttcatatgtgctgctttttctttgtggccgtactttacccgactttcttctgagtaaatggtgtgggcttgagaaaaattcatagcacttgaatgtgacacgttaccgatgggaattgcttgaataccaccaacattaaaagttttgtagcctgatttcttataacctttattacttccattatccgcatggaaataaaccttaccttttaacctattataaataaccctattagagtgataggtgattttgtgaaaacctttgtttacttgtgttgcaactttaaagtagtcatgcacaccacgaatataagcatttaattcagatacttttactggaatcgtattaatgcggatagacttcactttcttcttaatatttgcttgaattgatttcattgaatctttaggaatgtagctttgtgccacaaattttttcttcttagcaactgctttaaattcgattcctagaaataacgacttccttttacgaaggttagtaatttttgatttagattctgagatttcaagctttagattcttttcaatgtagtttttcaccgcatgaaaccatcttttagctgaattgtagctatttgtgaagattttaaaatcatctgcatatcgcacaataaagccttgttttagtttcgttttcttctgtaccctatatcttggtctgttatcttcatagtgtgtattcgttgggaagttatgccattgtgaagctacccaatggtctaagtcgttaagtacgacattggccaataaaggagagaggataccaccttgtggcgttcctttttccgctttaccttcacccacaatttcacatttcaacattttcttaataattgctagaacctgcttgtctcttaccccaatattccatagttgttttattagcttattatggttgatattgtcgaagaaaccctttatatcaatatctacacaatagtgaagcttattaatattaattaaaaagttggtacgagcgattgcatggtgagtcgatctcaaaggcctaaacccatagctatgctcataaaattttgcttctacaatcggctcaagaatctgtttgaaacactgttgaataatgcggtcaagcatagttggtattcctaacggtctactttttccatcagctttgggtatgaaaacccttcttacgctatcaggcttgaagttaattagtttttcacggactagatgaatgatttcatcatctgagaatcctttgtattcattaattgttatttggtcagtaccaggtgttttacttccttgattagatttaatagtaccaaaggcaagttttatatttctttcatcaataatgaaagaatataaatctttgaagttcccaccattttttgattttacatacagaccatctaattccccttgaaaattataatattgtggttgaatactacgatttgccattagtttgtttgttactctcctttataggatttcacctatctactcttactcgattccaaacatattcactataataattattttggtattgacttagggctatccctccactatgtttccatagtttcaacggtactatgcccctactctcatcacattgaactacatttcttctagtatttagcttccctgtagtgacagaacactcgcctataacgattaacatttctgtatgtgactttccacgttccgtaacctctagctgtgcatacgattttaggtccaacctctccacctgtcactttaacaataccatataattgctcccgattttcataatcacgatttttactcatcggtaagtgaccttgcgaacttagcaagaagtccatttctagacattatgggtatagatgggtacattcagttgttcgtctatccttaatggaattactaaccataatcgttttatagcctcccgccctatctaatacgacaagtacctctacttgtttttccacaactcgtaaaggagatgttagggtattattcaggcgacttcacctagcttcatacaataaagccaataggcgctttatcgcatgtaggagtatcagagtagacgcttcaagcttttgttggcagctctcatttcatctatcgagaatacagttatcataaacctttaataaatactgatttatgttctcttttcgtagttcaactacttatagagaaacgtgtcgcacctgtgcgacacgttcctaactgaaaaggttaggcgctgattcaatattcagcagaactattatttcgagaagtcaaatgatagggtaacgccttgaagggcttcctctgatactccgacatgcagcatacaaaagataagcctgtagttgtgtgaagctcggtgaagtcggctgagagctaccgttaaagtatctcgatactacgaaaactgtccagcggtggatggtgtagcctataggccgggagtctaaaaagcactcatgggtagaatggattcaacaaaaccaacgggtaggcagaatctgacgaatcttcgaatgtacgggtctagaacgatgacacatagaaatgtgtgtgccacgagcgtggtgctgatgtggatgagtaaaaatagttgttatgaaagtccatatgtcgttataggcgacatcaagtcagtaggcttaaaggagaaccctaaaagtgttatgcatagatagaaataatggaacgtggaaagccaccaacatggagaacttatcttcgaggaagtgtttgaagggaaggtgtttgtgagattagcaaacgtataaccttcatttatggtggtgagagtgatggcatagtaccggtgaagcaatggaaacattgcagagggatagccattagtctgatgaaagattgaccaaccgtttcaacaagctacgcagtcgaattataaggttcttgtgagactaaaaaaggtaaactctgaaaggagatccgacttataaagaaaactgaaaagcttagacacgctgaatattatgatatgcagtctacactagatgacttgtatcagcaaagtcaaaacggtaacaacttttataaattaatagagcttatgaagatggatgaaaacatacgtttagcatatcgaaatataaaaagaaatatgggaagtctgacagctggaacagatggaatgacaattaatgatattaaaatgctttcaacggatgaagtgatagaaaaagtaagaacgatgtttggttggtatgaaccacaatctgtaagacgcgtatttataccaaaaccaaatggagaccgtagacctttagggataccaaccatatgggacagattatttcagcaatgtgtattgcaaatattggaaccaatatgcgaagcgaaatttcataaccatagttacggttttcgccctaaccgaagtacacatcatgcactagcgagaatgaaatctttagtgaatagaaaaggaaacggatttcactactgtgtggatatagacattaaaggtttctttgacaatgtgcatcatggaaaacttctaaagcaattgtggacgataggtatacgagataagaaattactttctatcatttcaagactactgaaagcagaaattgtaaatgagggtgttcctcaaaaaggtactccgcaaggaggaatactaagtccgcttctatctaatatcgtactcaacgaattagattggtgggtaagtaaccaatgggaaacgataaagacctcacatccatataagggaaatagtgaaaaatatcgagcgctaaagaaaagcaaattaaaggaatgtttcttaattcgatatgcagacgatgcaaaaatattatgtcgtgattatgtaacggctttaaaaatgtttgaagcaacaaaagactttcttagaacacgcctacatctggatattagccttgaaaaatcaaagattataaatttgaggaaaaaagcgagtcactttttaggctttacagttaaggcaaataagaaaggaaacaaacatgtggctcatagcagaatgtgtgtaaaatccagaaaacatgcgtatagcaagctgaaaaaggctgttaaagatataagcagagaacaaacaccagaatcagtatggcgatttaacacgactgtaatgggaatacaaaattattattcagccgccacacatattaatcacgatctagatcacatgagttgccatctcataagaacactctataatcgactgaggcgagattggaaaaaagccactaagagtgacatgtcgactgtattaaggaaaagatataaacgatacaatcctaaattgtataaaatcaaagacatcgtattactacctatccatgcgcagaagcacaaaccggctagaaattttactcagtctatctcaaattatacaaaagaaggtagagagaaaatacatgatacgctaaaagccgtagatagggagacactccgacatgtacatcgtttttatatgaagcatcgaacagtagaatacaacgataacagaattgcaaagtttattgcacagtatggaaaatgtgcaattacgaaacaagaagttggattagtaggttggcactgtcatcataaaattccgttggaatttgggggacaggacaattatgaaaatctggtaattgtactagaagacatacacatagcaattcatagcgatgattcagataaggcaaaatcaatcttaaataagtacgacattattgaagataagaaagtgatgtttgacaagctgagaatatcagcgcgtcgacatcctatctttgcttcaatacaaaagttggtcaattgaattagatggagcgccgtatgaggtgaaagtctcacgtacggtgtgaagtgggggaaaaggtggagatgatgtcaaaaccttacctatcactatggtgcgacacgtttctctataaatagttaataactatgaaatgagaagactatctagattaacacagatagtaataactgatttaacgagtgagtggaatgaaagccttcatgttgagctgaaacactcccaataatactcctacatgcagagaaagttgatagactgcactgtatgaagctaggtaaagacgcatgaagaaagtctaagtacatgacaacatgtatatggcaattgataatgcggttggctataaactaatcatggtgagaatgaccaactggtctgacgaagatacgaatgtacgggtctaaaattcgaatacagtgaaaactgtatcccttgtatggggtaagtcaacgaaaagtaagaatcgaacctatgaaattcgtactatgtaacaatgaacatagagaacttacaggcctatagtatccacctaaaattagatgtacagctagttaaatcggaacgtgggaagcgagagacaactatttaaaccactatcttggggttggttcatataaggtataaagccgaaattgatttactctcgtgaaagcaggggtacagtaccgatgaaattatggaaacatagtggagggataaccccgagtcattaaagaaattaagcaatagtaaccaaatgaagttcataaggtcgagtatgatgatgggactttccaaaaggaaggagcaatatatccatcgatgaacgctacactgagaaacagcgagtactacggtatgcaatccacctttgacacgctatatgagcgcagtaaatataactgcacaaaaggaataggattatatgaaattataacatcaaaagaaaatatactactcgcataccgcaatatcaaagccaatacaggctcaaagacaaaaggtacagatggaataaccatagataattacaaaatgaaaaatgtagaaaacttcataaaggacattagaacagctttaaatgattataaacctcaaaaagtaagaagggtagcgatacctaaagaaaacggtaaaacaaggcctttaggtattcctacaatgagagacagactaatccaacaaatgtttaaacaagttctcgaaccaatatgtgaagcaaaattctacaatcattcctatggatttagacctaatcgagcgacaaaacatgcaatagctagatgtcaatctcttataaataaagggaataaacatcatatagtagatgtagatataaaaggattctttgacaatgtaaatcacaccaagctaataaaacagctatacaacattggaataaaagataacagggtgctaagcattatttcaaagatgcttaaatcaccgatagaaggcgtaggtataccttcaaaaggaacaccgcaaggtggtattttatcaccactactatcaaacgttgtactgaatgatctagactggtggatctcgaaccaatgggaaaacatgaatacgaaacacaagtacacaagccttcacaaatatagagcactgaagtctaccaagctaaaagaaatgtttatcgtacgatatgcagatgactttaaaatctttacagattctcacgaatctgcaaagaagatattccatgcagtcaaagaataccttgaaaatcacctacagcttaatatatcaagagaaaagtcaaagataacaaatattacaaagggtaaatcagaatttctaggattcaacttaaaagcagttaaaaagaagaataaatttgttgctaatactcatgtttcaagtaaacaaataaaaactattttagctaaaaccaaaaagttaatcaaagaaattcaacataaaccaactgtaatatctgtcaacaaatataatcaatatatattaggaattaaaaactactaccgaacagctacgcatgtaaattataattttcgcctaatagcctatcgtctatcacgaaccttatataatcgacttaaaaaccatgtatttgaaaaaccaataaacccttcggttttatataaacgacttcataaaaacaactataaaacatacaaaataatgggagtctatttatacccaatagcagatattcgaactgaaaatgcaatgaatttcagtcaaaacatctgtaattacaccacggagggaagaaaaaatcacaagagaattaaacaaagtgtagaacacgaaatcaataaaatgatgttcacacaaagaaatgacaacttggagtacgaggataatcgaatctctaggtactctatgcagttagggaaatgctcaattttaggaacattcctagaagctgaagaggtacattgtcatcatgtaacccccagaaaattaggaggaaaagatgattttaaaaaccttgtgattgttcataaattagttcatacacttatacatgctacaaagaaagagacgattgttaaatataaaaacttacttcaattggatggaaaacaattgagaaaactcaatatgtttcgtcagaaatgtaatttggatattattgattagttaatttaatgatggaacgccgtatgcggtgaaaatcgcacgtacggtgtggagcaggggaaaaggtggagattgcctcaaaaccttacctattgctatataatacggcgcgacacgtttctctataagcgtttagacgtgaagtgagagtgttgctgaaatttatcttaagcaacaataactaatatatcgagagttggaatgaaaatcgtcatgttgaattgaaacaactccattaatactcctacatgcatgatttgttagtagacagattgtgtatgaagctaggtgaagtcggctgaacgagcctaagtgatttttaatcatatggtgtaggataggtcggatggctgaaaagataactatggtgagaatgtcccttatgggtctgacgaatttgcgaaggtacgggtctaaaattgcactataccgaaaggtatagcacacaagagtgtggtagggtaccgagaagtacgaatctgacggtaggaaatcgggataagcaacgatgagcttataaactctacaggcttatagcaaacacctacggttatcatgaatagctagatatattggaacgtgggaagcaaaaaactgctaaatgaaaacagctactactgggcaggtggatataaggtaattagccgaaattcctttatttttgtgaaggtaggggcacagtaccgttgaagcgtctaatgaacgtggagggatggccccaagtctagtttgttttatgtttaattttaagaaaatgaagctcaatggtcaggtaggaatgtgggcaaaaacctaggaggtttccacagttgagcacaacaatgagatattgggaatattacaatatgcaagaaacatttgataggttatatgaagaaagtcaaggaaataaatcattccatggtctatatgaattgattacttcggagaacaatattcttttagcataccgaacaataaaatctaacaaggggtccaaaaccgctggcacggatttgttcacgatagataattataaaccaatgtataaaaaggaattcttatcattggtttgtaaacaactagagatatacaaaccaaaagcagtaaagagagtttttattcctaagtccaatggagataaaagacctttaggaattccaacaatgtttgatcggttaattcaacaaatgattaggcaaattttggagccgatttgcgaggcgaaattttacgaacatagttatggatttcgtccgatgagaggaacaaaacatgccatttctagagtaatgtttttgataagcagaaatacttttcattacgcggtagatatagatataaaaggattctttgacaatgttaatcacacattacttctaaaacaattgtggaatatgggtattaaagataagcgagtgttaaaacttatctatttaattctaaaagcaccaattaagggatttggaattccaaaaaagggaacaccacaaggtggaatactctcgccattactatccaatatagttttaaatgatttagaccaatggatagcaagccaatggcactattttgaaacatcatatccatatacaaataatgcaaatcaaaagcgagcaatgaaaggtaccaaattgaaacaaggatttattgttcgttatgcagatgattttaaaattatggcaaaggatttccgaacggcacaaaaatggtttttcgcgacaaaaatgtatctcaaggaacgattaaagttggacatttcaccagaaaaatccagaataatcaaccttagaaaaaacaaatctgagttcttaggatatttattatatgtagtacccaaaagaaacaaatgggtttgtaactctaggatatcaaataagaaaaagaagcaaatcaaacttgagatcaaaaagcgaataaaagctattcagttgtcatcaactcggaaaaatgtgcaattatataatgcctatgtacttggactgcgtaactattttaggtatgttacacatgtaaatattgaaatgaaacagcttgcatttaacctatcattagtaatattcaatcgattaaaaagtgtcgggaaatatgaagttccaatcaatgcacctccggtgtttacaaaattctttaaaaataattatcgaacatttaaagtatgtggtatttacttatttccactagcggatatacaaacagcaactatatggaattacacgcaaacccaaacaccttacaatcaaaaaggccgaaagattgccaaacatattgagttaaataaattggtattaggcgaaattaagaaactactaactgcaaatatccctaatgaaagtatagagtacttggataatcgaatggcaaggtattctatgttgaatggaaaatgtgagatacttaaagaatttttaccagcaagtgagctacattgccaccactatattccgaagggattaggcggaacagatgagtatgaaaatcttagaatcattcataaagaaattcatagattaattcacatgacaaataaacaaacgattgaatcctactttcaaaaacactcgttgactgtggaacaagttaaacgaataaaccaatatcgaagagcttgtaatttagaaaaaattaaacaataaacaaattagatggagcgccgtatgaggtgaaagtctcacgtacggtgtggagtgggggaaaaggtagagataacttcaaatccttacctatcactaacaatgatggcagagaggtcacacccgttcccataccgaacacggaagttaagctctctagcgccgatggtagttgggaccttgtccctgtgagagtaggacgtcgccaagcaactttaagacgagtcagaatgactcgtcttttttgtgttttataacttcttttcaaagctaaatattttgaagtgctgctcattttttaaaaggcctttgggtacgtagctatataagttttattcaatttctttcgtgattttttatatctaatttaagattttctattttatttcttaaagataggattcatcagtgtgttaaaatagtacagttgtttttgatgtactttaatataagaagatttaagttagaaaaggagataatatgaaaaagataagtataattactatagtagtcttagtcctgctagtaatcgtgtatatgttagttgggaattatttttataactacgcgttgaatgcgaaacaagaaaaggaatttttgcaagataatcctcatttagtagaaacggtaaatgcgtcgggagatgtattggctgcaaatgaagaaaagaatgcgaacttcgtatcgaagtataaacctaacacattaactatacgttctttcgataaattaaatttaaaaggttatgaatatatgaatgaaccatctagtcataaatgggcaattgtagttcatggatatagtggtagagcatcggaaatgacgaaatatattcgtaacttttatgaacaaggctataatgtcatagcaccagaccttcgtggacacggaaatagtgaaggggattatgttggtatgggttggcatgatcgtaaagatgttttaatttggattcaacaaatcttaaagaaagaccctaatgctgaaatagctctatttggtgtttcaatgggcggggcaactgtaatgatgacttcaggagaagatttaccttctaatgttaaagttattattgaagattgtggatattcaactgttattgatgaatttacttatcaactaaaagatttattccacttaccaaagtttcctgttatgaatgcggcaaatacggttactaaattaagagctgggtatgatttagaagaggcctcagctgtaaaacaagtagcgaaaagtaaaacacctatgctgttcattcatggggatgctgatacattcgttccttttgaaatgttagatgaagtatataatgctgcaaaagtagaaaaagagaaattaattgttccaggtgctggacatggggaagcggagaaagtagattcgaataaatattggaatactgtatggaagttcgtagggaagtatattccggcataattaaagttgttgcatttatatagacgataatcggagggataatggttaatccttttgattatcgtttttttgttaattaggtattctgctataagtgtatttttgtatgtactatatgaaggaggtagagcaaaaacttttgaattccttaatctcagtgctacaatgattgaaaactaaaagttaatgaggtgtttctatgaaaattgaagtttggtcagattttgtatgcccattttgctatattgggaaacgtagattagagatggctttagagcaatttccgcataagaaggatgttgaagttgagtttaaaacttttgaattagatcaaaatgctccaatctattctgggacaagtattaatgaagtacttgcatcaaagtatggaattagtattgaagaagctaagcgtaataacgtacagctaggaaatcatgcagctagtatgggtttaagttttaattttgatgagatgaagccgacgaacacgtttgatgcgcatcgtcttgcgaagtttgcaaaggatcaaggaaaagaaaaagagattacggaaaatctacttttcgcatacttcactgaatcgagaaatttaagtgatgtggatacacttgctactatcgctgaagtttcaggtttagataagcaagaggctttaaatgttattaatgataaaaatgcgtatgcaaatgatgttagaattgatgaagcgattgctcagcaatatcaaatttcgggagtaccttattttattattaatcaaaagtatgctatttcaggtgcacaaccacttgaaacttttgttggtgcacttcagcaagtgtgggaagaagagaatcctgcacctaagttacaagaactttcttcagagggtggaagcgatcttttttgtactgatggaagttgttcggcgccgtcgaaagagcaatagtttttataatagagtagtaccccatagatagttctgtggggtgcttgtatataactatagaagaaatacataagtgaaatctataaaatataaagttttttaaaaaacgtattgacgattatactttagaggtgtaatatagaacaagtcgccgatgacaataacgtcgcaagcgacaaacgaaataaaaaacttagttgacattgaaagatgaaaatgttaacataaggaagtcgcaaatgagcgaccaagtagttctttgaaaactgaacgaaacaaacaacgtgaaacgtcaatttttattttagatgctagacaaactaagtgcgcccataagggtagatttagaattgattaaatagcactaatctaggttaactcacgaaagacctattaccaatcacctcacctagaagggaaacctaaaggggaaaacagcatggtgataaagtcataagttggtcaactactaagatcacgactgaatggcaaggtaaaactcataaataaggatgaaggctacactgcttgaatgatagaccaagggtggtcagcgatacgagtaatgaaaggtagttgatacattactagggaacaaggttataaagaggatagtttaggtcgtacatataaactatcagtgagtctctccctcccagccacagtaagtggaaaaaggtcaaacgtcacatccgacattatgaaagctattctttatctatctaaatggggattgcctaagttgggatgccaccggcatacttgcgaatttggctatgaagaatgacaccaagttactaacaaggtgtgtgacttctgaatacccaataaggcaacggagccttcatagtagtccgagctagggaaagcctagtacatggcgaaggaaggcaacttatccggtctaaaacaaaattggaaggtgtgtgagacacaatgagaaatccaaatgcagtattagacaatctgaataaaaaaacaactaacccagcttataaatttgaacgtctgtatcgaaatctatataaccaggagttctactttgcagcatatcaaaaaatatatgcaaaagaagggaacatgactagaggaacagatgggcataccattgatggtatgagtttggaacgtatcgataaaattattgaaagaattaaaaaccaaagttatcaaccagctccatctcgcagagtatatatcaataaggggcaaaataggggaaagaggcctttagggataccctctatagatgataaattagttcaagaaatcgtaagaaacatcctagaagctgttttcgaaccgaccttttctaacaattctcatggatttagacgtaatcgcagttgtcatacagcactaacacaagcaactaaaatcttcaaaggagttaagtggtgggtagaaggtgatatcaaaggcttcttcgacaatattgaccatcacattttgattaaactgctaaaaagaaaaattaaagatgaaaaattcattaatttaatctggaaatttcttagagcgggttatttagaagattggaaattcaataatacttatagtggcactccacagggaggaataatcagcccaattctatcaaatatttatctaaatgaacttgataagtatatcgaagagtataaaacactatttgataaaggcacacgccgacaaaacaacatagtatatacccaaaaatataagcgactttggtatttaaaaaagaaattcgcagatagaaaagtactggctccacacaatgaattaactgagattacaagtgaagtgaaaaggcttcaaaaagatatacgtacaatgagttcagtagaattaatggattctagctttaagagaattcaatatgtacgatatgccgacgatttcctaatagggataattggttcaaaacaggacgcagaagaagtaaagaaagaccttacggcttttctaaagaataaactaaatcttgaactatcatcagagaaaacactcattacacacggcaaaatgaaagcgagattccttggatacgatgtaactataagtaaccttcaggctgtatacaaaggctcaaacagtagaatagccaaaaggtatgcatcaaacaagtgcgaaatttacatgcctaaggaaaaatggattggaaaacttaaggagctcaaagttcttaaaatcgaaaaagatagtagttggaagtctattcatagggccgaattaataaactccgacaatttagaaattctaagtatatacaatagtgaaattagaggtttatataattattataaactagcaaaaaatgtacacagcctacagaagtttcgctacattatgaaattcagcatggtaaaaacttttgcaaacaaatacaaactatcagtcagcaaaataatgaaaaagtttaatcatgaaggcaattttagaatttcttacacgactaaaactggtcagaagcatagatatttctataatgaacctttgaaaagagtttatgaaaatccaactactaataaagaaatagatatcgttccaaatactatgatatatgcaggacgcaatagtctaatcagacgccttcaggctagtaaatgtgagtggtgtcaaactgaaaacaccgctatcgaaatgcatcatgttaaaaaactcaaagaactaaaaggaaaacaactttgggaaagaatcatgatagctcgcaaccgcaaaacactagcattgtgtaaaaagtgtcatgttgacctgcacgctggaaggttagattgaaattcagaggataagtggagagccgtatacatggaaacatgtacgtacggttcggaggggagcgtttgaaaacctatcacagtaatgtgaaaaggcgttgggcgcttaccctacgacgatgtagaacgtgtagaaataatctctactatacttgatattgtataatcttagcttgatagtgatgtggcggtaccccatgcccatcaacctaacagaacaggttgcccccaaaacgataaaaatgaacttcattgctataaaagactctaatttttcgttttgggggcattataaaattttaacttgatggtggtgggagataccccttcaaaggaatttcctctttaatgtcgaaatatttcgttaaaacgagaatcaaggagagaggaaaatggataaggaatttttcagcaaacattttagtcttgaaaaagttagtgaagggatatacgttgcaatagcaagagaaggcagtggtgccgtagcaaatgcaggctttattgatttaggagataaaacaatagtttttgatacatttaacacacaacaagctgctgaagatttaaaatatattgcagaaaaaataaccaatcgacccgtgacatgggttgtaaatagtcattggcatggagatcatattcgaggtaaccaagcatttaaggaaagtaatattatttcaagtcaagttacatatgaaaaaatgaaggatattcatccatcgagaatcaataagcagaaaaatgatatacaaggtctaagaaattatattcattctttaaaagatcaaataaatcaaaccaatgaccctaagttaaaacatcaaataaactttctaagcgaattggaagtttcattaccaactttgaaattagttttacctcaaaaaacattttgtgatgcaataacgtttcgtggaattgagcgtagtgcacagcttttcacattaggtggtggacattcattttgtgatgcagttctctatattccagaagagaaagtaatattcatgggtgatttattatttgttgattgccatccaacattttttgaagaatcgaatcctgagaattggattcgcattttggaaaaggttagcgatatggatgttgagatagcaattccaggacatggttcaattggaacgaaaatccgcattttagaattaatagactatataactgatttaactgtaattgcacgagaaaaagaccatatcgaagatattaaagtacctaacaactacaaaaattggggttctccagaggtttatcaacagaattttaaaatgctaaaaggaatattggaatgttaaatcatatagaaatcccttttacattccacaatatggggtcccgcccatcgctattaagctaataaaaagaaataccctcaaaatgaaaatatacgttattctttctgtagaatcataggaaaggatggcgttttttgtatgtctatttctatatctgatgaattacaactatttgctcaagagattcaaagctttttatctccaaatatcttacgagatcttgctagagatgttggtttcgtgcaacgaaccagtaaataccaagcaaaagatttagtcgctttatgtgtatggatgagtcaaaatatcgctacgacttctttaactcaattatctagctgtttggaagcatcaacagaagtgctcatcagtccagagggattgaatcaacgatttaatcaagcggccgtccaatttttacaacacctattagctgaactactaaaccaaaaattgacctcatctatgccgatttcttctccacatacttctattttcaagcgtattcgtattttagattcaactgcatttcaacttccagatcccttttctttcgtttatccaggtgcaggaggatgcagccatacagcgggagtaaagattcagctcgagtatgatttattaagtggacagttccttcatattcatataggtccaggtaaacaacatgatcgaacctacggttccctgtgtgtcccaactgtaacagcgaatgatttatgtatccgagatttaggctattttcatttgaaagatcttcaacatatacaagagaaaaaggcttattatatttcacgtatcaaatcgaatacacgtatttatcaaaaaaatcctaaccctgattattttcaagatggcagaatcaagaaaggtacagagtatatccagatagatatggaggctttaatgaactctcttcaaccaggacaaacatgtgaaatattcaacacttatgtaggaatgactgataaagtcccaactcgtgtgattgttcatcggctaacaaaagaacaacaacaaaaacgattacaagatcaaactgtaagagaaaaaaagaaaggaatgaagtattccgctcgtagcaaacgacttagcggtatcaatgtatatatgacaaatactcctacagatattgtcccaatgggacaagtacatgattggtattctttacgctggcaaattggcgtgtccagataaggacacattatctagttggtgaaagtccaatcgggagaatcttcttgatgttgcctaacttttttcaaaatgtcctttacaaagggtacagattaaaaagtacagctacctttttttagaacatcattcgtatacaagagcaaccttagcgtaaacttgcgcttaatggtacttgagaataaactgtgaaattgttactataagtaccatgtttagaaaatgtggaagaaatagaactgttccaactcttgtagatagatccagatgtatcttctcttagaagtacgtttgaaaagctagcttggctaaaagaattacgtccagtatcttcaacgccctgaaccatttttactggttcgtattgagaaaatgagccatatacaggctgatttgtatatctagggattccatttacatacatagtaaccgtaccattgccgttattaattattttaaggtttactcgatcactatctttaattgatgtatcatattgtgtgttccaatacttattgttttgacctgattcattatatcctgaattaagaaatactttatatccacttggtgtttttgaaataccaccttcaactttagatgctccaatacctaaataccaattcacatatccatccttaacaacaactgattttggtaggtttatatcagctgcaattccagtataattactatttgtaacactttttacagcaccttctgtagctgcaaaacttgtagttgaaaacattgatagagaaattagaagtgaaccgactagatacatcatttttttcttacttttccttaatacttgattcatttttaaatcccccttatttgtaattattaaattgtattaaaagttggccaactaactaagacttacaaaccaaagatacattaggtttaattaaatgtatatattttcctgtcataagtcattgaaatgtcaaataaattagaagtttcatatttattaatatagggggaattgacagcatgaagtgttatgtctatttaaaattatgaaggttttgttaaaaataagattaaagcttataaatttgttgggtataatgtgtattacgatttatttaggagagataaatatgaatggaataccaggggtttttcaaaagatatatttgaaattctgagaaataaaataaaaacaaatgaaataaatgaattgcttgtgttaaagaatttattggaatagttagtaggtaaagggaaatatatgatttaaaaggcgtggaattctcatataaaaagaagaaaggtgggcagttatggaaaagacaagatcaaagttaaataatgcaactattgaaggggggatagagacattaaaagatgaaaatgaatgcttacgtatggaaatcgattatttaaaaaagttaaaggccttacttcaaaatgagaagaaattacagaacaagactaagtggaagttttagtctatcattctacgtacaattatagtaacgtgaatagtccgaaataaatttgtttcggactaagggttcaatattctatccagtgtattcaacatttttataaaaagttgaattttctgattttataactgagaaaaatatattacattaattaatagatacttctacagagacactaggaattgttggtgctggtgtatttccaccattagaagattgttgaggtgcatgtaaactattcgtgctatatgctaatgcacttattactaccatttttttcattaataataagaatataatgaatatttaaagtgtccttattctgttgatatagtcaatttgttttaaaacagaccgtctgtaataggcggtctgttgtttgttatggttggcgactgctattcttttactcatctcatattatatttagtttaagaattgagaatagaagaataggattagaaaaattaatgttttgccaaataatttattaaatatacttaaaggaataaacagttctcctattgtaaggctgttgagtttattcttctttggtctttttatcaattctttaaatgtttgaaagtttattttattaacgaaagaccaatttggcatagcttttgtatctgaatctattttgaaaatgatatgaatactatgtgtataaaagttgcctatacttaaaataagcataaatcctaaaataatgaaccaagtcattttttagcacctcctttcagtatttaatattaagatattaataacggtgaggaagtgtgctattgtccatgaaaaatattgagaaattgttgaggaaacgttgagactgttgcaatgcaatcgatcgtaggatagttaactatgcttgtcctgttatatttgttaaaaaaggaaagagaacagttgcgtagactgttctcttaagacctgcggtagtatgtcaactgaaaaacaaaagaatttttagttatcaaaggttcatttgtttgttttgtggtataagattgtacgttgttcttcttagatttaaagcgcggtgcgctgttttgttttttgaaaaagcgtgtataagcatccgcaaggttgcgaacagacgactgaatcgcaatactatccacttcttttagccaaacaagctctttcttcatggcaggtagtttggcagagcatgtaccataggtcaagccttttcctgtctctttgtatgcttgatcccataaggataggaaatgattgaatacaaagcgagaacacccaatcgttttgttgattagaattgcttgtgcctgatttggatagatacgaaacttataggctttattcatcattatttgattcacctccatttcggtatatgactattatacaccaaacgtacattcgataggtagtggagtaacactttctatatgtcgaacaattaagatggcttcctgccatcccttgttcgaagtcaattcatctcccacctactcactgggctgtgccccttcacgctcctttttatctattagtaaaaaatagtcacctatatggttgatattggtgatactgttgatatgattgaaaatgttgtgtcggtatactataaggatgagcatatggatctgctagtggccaaggctttggtttaggaatataccaccatggtatttcaggtgtccaaggtttaggtatagtggttaacataggactctgtctataaaaatatccattcaagttcgttcctcctaacataaatttgatatttatttgatgtattatatctaattgggaacatttatgaatcaaatataattggactatcaaaattaacttttttttcagaattttattgaaaaataaatataatacaattaaacgaactggatactttgctataatggtaatatataacattagtagacttttataggatgggggaatatataatgatggtttcagctaaggggaataatgaaattacaaagctattaagcgattggtatgttgaaatccgctcaaggcgtataggtaatgcacatcaattaaaagaaataattgattctaagatgcataatattgaagaggatcaagatttattactctactactcactactagattttagataccaatttgtaattgataatttaagcgtttcaaaaagcagttttgacaaagttgaggcttttgatatgcctacagataatttcctagcttattattatcactttttcaaagggattcatgcctctactattggcgaatatcaaatcgcaaaggagagttatgaaaaagcagaaaaacttttagactgcattcctgatgaattggaaaaagcggaattttattataaagttggagctttccattatgacatatatcaagggctattatcttataaaaaagtatcagaggcaagagaaatctttgctcaacatgctgggtatgagatcaatgtagcattctgtgataatcttataggcttagcttgtactcatttgagagaatgggagctcgctgaagaatatttcacgaaagcaatggatatgttccaaaaaatagacgaagaacaatttattttaatggtgcgtcaaaatttagggttaatgtatgctactcaaaatctttcgccattagccattagatatctttcagaagtaaatcaaaaaatgcctaacaattataaggctctttttattgaggcaagggaacacatgaaggaaggaaatcactccgtcgccaaagatctcatagcaaagggatattccgtttgtcaagagattgaaaatatagagtatctacaccattttaaaatattagatgcaatgaatggaggttttcctgccgaagcacttgaaatgacagtgttaaaaggcgtatcatattttaaagagcaagaacttttcgaattcattaaggaatacgaagaatatcttgctactgcattttataaagagaataaccatattaaagcaagtcattatttctattcatgttctcaagcaggaaaaaaagttattgagaaggaggcattaaaatgaaaaaggcaattctcggtttagttggtgtaattactatttttactttaatgtttggtgcccaatcccctacagaaacacataaagctattgatgttattcaatatgctcacggaaatcatggtggttaagatcttaatttagcgaggataaaatcgcacaatacactcatagccatactgacggatattaaatgaataaaggtcttcacttcattgtgagggcttttttttataagaaccccacttataacatctttaaaatctactatatgtgaactacccgccacttaacgccctaacggactgtttgaagtgggggcttctcggttagtcgttacttttggtagctaacaccaggtttaccgttactaatatctcgccatatcgtcttaccaattttaagattcgttgttggtggattcacagcctcgatgatttctactgtattattcttcaagttttcttgaactttctctgctaactctttcgctgctttcgactctttctgtgcttcatttacttttttatcagtatcttgtacaagttcttctaatctatctaacaattctttatttgctttatttcctaaagtagcgcgaatcctattgtacatttttcttaactcttcgttcgcatcagtaatttcacgataatcgccaaacacgtattgatcttgtgaaggatcagtatgtgattcatcaccaacgattgcccttgcttcaaggtataacttaggtgtgaatcctgtatctttgattcggattgtatcgccctcattaattagttcatgtgctagtccgaaaatacgtccaatcgattgcgcttctacttcgtatgaaacagaagatacacgttttgctagctctgttttcataagagtcagtaaacgttctggtgtgatatttccttctgtttctggagtatagaaaccaaatttatgctttccatgttcattccaccgttggaacgcatcattatcaacaatgtaaggaagtccgttattgatactctcaattgtgataagtttatcaccttcatctcgtacaaaaccgacaagtgctgtgcaaatatctcttgagtgctcaatacgtctaacaccaactaaatcttttcctagcactacttcttttccagtttcttggccacgtttccttatcatatctacataccggccagtgatttgagaacctactacttcgacacgatattggatttctaactcaaataaagtagcgattttctttaaaaaagcgagcggatctataaattcatcaatagtcattgtatggaatgaagaataatcggtttttccacgtttccactttgaatccgcaagagcaatatctataaacgtattaactgtttcactctctatgtgttgtggtttaatgaacccatccttggctatttgaacccaagcgccagaagcatgtacagtaatcgttctatcattagattctttttctacttcattattgataacatatggaacaatacgaccatcacgcacttcctttaatactaagttctgttgttgtaatgcaactgcatgtgaagttccatcaaaagttttaaattctaacgtatcaatgttgtttttgatttcccaatggcgtttatcatcccaatagtcctttgattgaatgactgatataatctgatctgttttgaaatcaacaacatgaagtatcccacttggtgttctcatctaaatcgctccctatatttcacctttgctgttcctatatcggaaggtatgatttccagtgtattaatacctttattgataacaggaaaattactaaaaatatcttttatgttaatagcgtttttcccctcaatactgacatgactgctttctgtatcaatcacgactttgtcaccaacatcgaatatataaggcggtgtattttgattatttaaattcactttccaaaatttcaaatcagaaactgacatcgcttctactggcggaacatcttgccactgcatgatactaatctgtatttgagctgctttttccatatgtttattgtctttatcggtccatcttgcaaagcgttctgaatcatctttttctgttccaggaagaaattttgaaatataagcctcccaatcattaccggttctagcgatccacaacctaccataatactgattccatgtattcggataatcaccactctcataaatcaaacctatttttccaggcttattatcatatccaattaccatcgttccaaaattttgttcagcttgccaatagaggtcattcatggcaatttttgaaagaactttgctgttttcatcgagtatcgctatctcaactcgtcccatttcattgatctttttacttttacatgtaacgtgggcttgcataataaaatcttgtactggcccaccagggatactctttttaacagatgcgccatgccatccattacttgaaccatagtccgaacaatagaattggtaactatctgttttcatttcaccaactggattaccatcttccatagaactaaccttactccaccctacagtagtggacatatcatcccatataagacgttgatttctttctacaggcaattgttccatttttaatggcactccaatacggaaataatctggttcctttgaatatttatcttcaaaccatacatctaaaaaagtgtttggttttttaatatcaatttcaataatcggatttgaatgcacagagcctttgtttttaacattgttctatcaggcattacatcaaaaatcagttctgctggattttcagtaataagccactccgctatttcttcttttaacgtttctaaattcgtcccatttggaacaataatccccacaggtacagaaagaggacgggtttcggtatctgtacttaataaccttgcccccggatatccgggggttttcagaaaattcctccttaaaggcgcccatgttggaggattccaccctctttcaatatgaatataactttttcgttctccattaaattcaaaggaactcatcgtctctctccttttatacaaaagaaaagaaacccaaatctaaaagattgagtttcttgcttgtgctctattttgatattcagttacatacggatggctcacacgcgctatttctcttccttctagtatgacaggaatttcaatataagtaggttctgatttcatatagggttgcttatcaggattatcattgtcaggtctatattgaatgacattaggattatcagataatacttctctccatctagaaaggctgcctacatcatgaatagaaagtccctcaaatcgttccatttgacgtccaatttctcttaccatatcacgcatattttcagggatatgtgtaatccaatcattttgccaatctccatctacaaagattgcattaaaatactttgttagtgggtcatcaccttggaaactaaatatttcttctggttttatagaacgaatactatccatagctcctgttactgtatcttgcaatgcatctcgcacaacagaatattgacttttaatacctatcgcaattccttgtgccatacgaacaccagaaaatctcaacttatttgattcactatttaatttcaattcatttacaagagctgcgtttgctttggtacccatttctctactttctttttcagccatgtgagctgatttttgaatacctagcgcaaatccttcactaaacggcttaccaccttgatcacgtgttaattttgatggagagtttacattaagtgtagctttcaatgcatcaaatgcacctcgtgccaaactagctgctacattttgtacattccattgaccgttagatataccgttagcaaaaccactagcaaaagcttctccaggactaagagagctgacactccctaatccatctttaccaccttgagcaacacttgttccgcttgcaacagcggctccacgttttgctcccatatcacttgcgaatttattaccagccttatcaccaccgccaccatcggttgcacttcctaacataccctctacacctaatttaacattactagctgctccgactacattccctttattcccgttaattagtcgttgcataagaagagtagaagatgcgccgccatttccatctgtggttgatcctaaagtattttctacactttgtttaacacctacggccgctccattgacattccctttattattattaatattattaaacatcatagaagtcgcgttattaccgccattattatcagttgtacttcctaattgctgttcaacgcctagtttaatattaaaagcttcacctataatatttggcttatattgagccataattcgattcattaatgtagtagaagctgctccaccatttccgtctgtggttgatcccagtgtttgttctacaccttgcttaacttcctctgcggcttgaacaggttgtcctccattttgacgaattccatctgcggtactttgcggaatagctgccccttgctgagttgtatcaatgtttgttttttgtacaaccatttgtcttataacttcgagtgcctgatctatattaaacttcccattgtgtaagccttgaacaagagacgcaattgtcacttctccattcggccctaagttgtacttagtcttatcttcaatattaactcccaaagtattgagaacgtcttgtacattaataaaccctgtttccataccagtttttaacgtagccattatacgagtgccgtcttttgctaaatctgctgctgttaatttagataactgttgttgaaaaaaaataaacacagcgtcaatacctactgtgccctcgtgtaatccatttacaaattgtgtagttttcatttttccgagtggtcctaaatctatatcgagatttttctttaaatctaagtttaacttagatgcgacctccccgatattcatctgtttaaaaccatcggtaaatgaagtcatgactttaataccttctggtgtcaatggtttattacccatttctgaccgcatagtgtttatgattgcaatcgctacatcttggaccacatcactatcaagctaagattatacaatatcaagtatagtagagattatttcttttttctaaaagccaggcttagaaaatttaaaggtttgcatgcgaaataaaccctatcgggtttcattttttgaattaggccgcttgatcttcagaaatggtagaattgtaaacgacacctaatatatcaaagactgttttcttctcatatctgtgagattttcgcccattttgctgtaggaggttgaacaggcgaatgagaatctttgataattcttgggtgtctttctgtatggcttgataaataagaaaaaaataatctctaatcatatatatggccttatattcactcagctctcgtttctttttcataagaagtagttgacgcatttgaaacatagtagaagaacagaggagaatggcgatcagttgcccatacaaatggcattctaatctttctcgttttatttttttacaatggtgaatatgaaagaatgatttccatgttttaaataaaatctcgatttgccaacgtaaagagtaccaatcatgtacttgtcccatcgggacagtatctgtagaggtgtttgtcatatatacattgataccactgagacgtttactacgaggggaatactttattcctttctttttctctcttacagcttgatcttgcaatcgtttttgttgttgttcatctgtaagtcgatgaacaatcacacgagttggtactttatcagtcattcctacataagcatcggatatttcataggtttgtcctggttggagagagttcattaatacctccatatctatctgtatatactctgtacctttcttgattcttccatcttgaaaataatcaggtgtgagatttttttgataaatacgtgtattggatttaatacgagagatatagtaagcctttttatcttgtatatgttgaagatctttcaaatgaaaataccctaaatcacggatacataaatcatttggtgttacagttggaacacacagagaaccataggttcgatcatgttgtttccctggacctgtatggatatgtaggaattgtccgcttaataggtcatattcaagttgaattttcatcccagcagtatggctacatcctccagccccaggataaatggttgaaaatatatctggaagctgaaatgcagtggaatctaaaatgcgaatacgcttgaaaacagaggtgtatggagaagaaagtggcatagatgaagttaattttttatttagaaggttagtcaatatatgttgtaaaaactgaactgctgatgtattaaaccgttgattcagtccttctggactgatgagtacttctgtggatgattctaaacagctagataactgagctaaagaggttgtagcgatattttgactcatccatatacataaagcgactaaatcttttgcttggtatttactagttcgttgtacaaaaccaacatctctagcaagatcccgtaaggtatttggagataaaaaactttgaatctcttgagcaaatagttgtaattcatcagacacagaaacagacataaaaaacgccatcctttcctataattctacagaaaggataacgccttttttactttatggatagtccaaaaccttaattttatagcgatgtagcggtaccaaatatccgtttaataattatttatgctaactttatatatctgtataatcaaacgttattattcatttttaattgctctaaaagataatcacagacattcacaaaaatacattgtttttttaaacttaataataagtatttcaattcaaattcttgataaaaaatcttagtgatatatagtttaaactcatctaaattaggcttttctgggctatatagcatatctaaaggaagtttaaatttagaaaacaaatgatcgttttgtgcaaaaatcgaaacttcttctctagttaatcgatcatgaaatgcaattgaaatgtttcttaaggcatttacttgttcttcttcaaattcatgatctataacaaatctataaaatgggaattcatctgactgaatcatactttgcataagtctaaattgatatcttaataaagtcacttctttgattaaatccatatttcccctcctttatttccctaaattaaccagtttatcataacaatttataacttgaaatacaaatacttatgatatatcacccatacaatttttattaacataacctatcattatcaatagttaacgatgctaaaaatttcgttatggggtaattaaaactattagcttgatagggatggggtacttttacaggtctctcatgaaagtaaaaaaattaagtttaaacatactatacgaggagcggtttgaatgaagaacaagtttacgcgtatgatcatgttaatggtggtaatggctttatcagttacagcacttgcagcatgtggagataatcgtgatcctgaagaagttgctacagcatattttgaagatgctaaagacggaaatgcaaaagattttggaaagttatttacaccagaagcaaaaaaaatagttggttttattggcggaaatgcagaattaatgaaatcaattaatgaagatcttaaaagctataagattagaaaagttgaagagaaaaacgaaatcgctacagtaactgttgatgctgtgtataaaaaagattctaaaaacgattataaaaaagtaatcgtaattgaattagagaaaactgaagaaggttggaaaattagtaaatcataaaaaaaacggtctagaattctaggccgttttttatttttgaacattttaactcatagttattttacatcttatcctattttttttcttctttgtaattccatgctatttctactacttcttcaggagtcaattcttcatcattccaaaaaattaaatcacttggagcagggtgaggtacagcagagttattaaattgatgaacatagttactgtgttcatcttcaggtaaatcaagatcataaattttttttacaagctcaagcagttctgttttcgtcattttacatgtcatatttttcatccttccgtttaatttatagccctttggtcccgaaatggtatgcgggatctaaaacgttttgatgcattttaggagatacaattattagattatcaagattatagacatctccacctttatcaataggctgtttatgatgtagtatatatttattatggttcccataatgttctgctcgtggtgagtaaggtgccttaccctgcttcataagttttatattcataggactaaattctttagcatagctcgaatcagaaagtgttttccaaaattcttctctaaaatcgtcaaaagatttgaattctcttcctactaatttttctcgaacttcttgcggaataataccaatagcaccatcattatacattaacttcttttgggtacctaaacttcgttcgaggttaaaacttgaggtcactgtacctggggtctttctttttaccgcacttgaagtttttgcaaacatatatgtatctgatggtttaatagtatcaactttataatctatcttaccataagcgaaagctggttctaaacgattttctaactgaagcttggatatagatgataaattttttccccatcttgcaccattacctacggcactggcacctcttgtgacaagtccaaagaaagctaaattagtcgctccgtatgctactgattccgtgatactttctgcatctccatattttatgttctccacataccaatctgataaaacatttcgtatagcatacatctcttggacttcctcgtccaactcatgttttaatgttccaataggattattccacatatctttcataaattcgtatttatctctaaattcctctttcgtatcatcaatagaactctccacaaagtccgtaagtccatattttgcatcttccaatgcgtccattggattatccaccaagtttccgaaaaagtcggatgtttggttccaccctttttttaatggatcaaaaatagtgtcccctgcagccttcccgcttcctcgctgaaaggcgtcccatagcttgcccatctgattaaaatccccaaacgctttctcatccgcttcacggaatgttttcgcagctttctttagttcgagttcagtatgatgtaaatgcttaactaaatcatccatactcctcttttttgagaaaaattcatcgaaaaaccgttgatatgccatcccttcccaagacatctgtaattcgaacgtgacttgtaaaagctctcgaattatactttccatagactctctatttcgtgacatggaatttgcagctgattctaatttatctgggtcaacacgtacttgtcccaattaatttcctcccttcacctatatgtataaaacttctagtacaagtatagaaaattcataggggggtacagacacatgcccatcaacttaagaatttgcactacccccaagtgtcaaaaaacgttattcaaatccaacatatcaacattgtttttcagttcccaatgccttttgtcatcccaatagtcatttgactggatagctgcaacgatttgatctgttttaaaatccacaacatgcaaaatgccgcttggtgttctcatctatatctctccctataactaacggtcgctttaacatctggtggcattatttcgattaaattttcgccacgtattacagttggaaaattactaaaaatgtcttttaaattaattgcattcttaccgttaattgttacaagacttttttctgtatcaataataattttgtctcttgcatcaaaaatgtaaggcggatcgtttttggtatttaaatttactttccaaaactttaaatcactaactgacatcgcttctacgggcggaacatcttgccattgcataatactaatctgaatttgtgcagctttttccatatggtagttattttcatctgtccaccgcgcaaaacgttctgaatcatctttctctgtccctggtaagaattttgaaatataagcttcccatacatttcctgttctagctatccacaatcgaccaaaatactgattccatgtattcggataatcaccactctcataaatcagtcctgtttttcctggcttgttatcatatccaataaccatcgttccgaaattttgttcagcttgccaaaagaggtcgttcatagcaatttttgaaagaaccttgctattttcatcaagtatcgctatctccactcggcccatttcattaatctttttactcttacatgtaacataagcttgcataatgaaatcttgtactggaccgccaggtatattttttttaacagctgcaccatgccatcctttgcttgtactggtaccaaaatcagaacaatagaattggtatttatcggacttcatttcaccaaccggatcaccatcttccattgaactgactttactccaacctacagtggtagccatttcatcccatataagcctttgatttctttcgacaggtagttgctctgtttttaagggataaccgattctgaagtaatcacgattataaggggactcaccaaaccacacatctaaaaatgtacttggtttctgtgcttcgatttcaataattggaggtgcttctatattcccttgattaataaaagaagttgtaacttcagtatcacctttttgagagaacgtgtgaatattttgttttcctaatttatatggcattggacaaacaaaagtaataacgcctttacctctattaattatttcatccaagtcaacagaaccatcgattaatgctagataagtcctatctaattcatcatcaaaaacaagttcagcaggttgctctgtataaagccaatccgctaaatcttcttttaccttttgtaaatcagccatatcttttttcgctttaattacaagaggaacatcaatacgacgttcctccgtttctgtatgaagaaaaagagcccctgcgcgatgagggactcttactaattttcttttaactggagcccaggaagggcgttttcttccaactagcatttgaatataatcttttctgatcttattaaaagtaaaactgagtttccccaccatgctcaccacccttaaaattccgctcttcttttttggtcacgatcttgaagctttgtcgtatatgcgtaacttccgttcgctagttcttttccatctaaaacgtttgtcatattcaccgttacattcagttcttgttctctacctgatctatccgagaacatagtttttgctgtaggtgcgttgttataaggtgattgtagttgcgtatacccattgaaatcagcaagtgtattatgcgggatactataatgcgaagtttggaatccaaaatcaaaaacagatggcatattccccatctgtttcttaaccgttccaactacattttttgctgcatctacaacaaaacgtttccctttatccataccaaccccaacaccttctggtacggcgctaccgactggaatcatcactttagatggactgttaatttctaacgctccagaaatagtctttttaatctctccagcaatgcttttcgccttactatataacccacctgtcgcatcatccaaacctttttcaagaccttctatatccgctattaatataaacaagttaagaaaaacaaaaagagagcatcatattgacaccctcttgacacacagagaagcacacgctaatatcataaacgagtatagttcttaatattttctaatatagataaccaacagtcctgtagaatggggtccaccgccaagtgatccatttcttcaagggctttttttatactctctttagttctacgagggaactctttcatatccatagttccattagaataacaaatcaaacaagcttttaatgcccctttaacattattcaaattaaaaatcgagaatgtataagattcatcaatactaaacggaggactcttccttatttcgtctaccactacaccgtcagagtctctccaactatactcaatacgagtcaaattctcttcttctatcattcttttaaaatgattatataactcctttttcttatcatatatcttcaaatatccatctttatttctatttccataataaacagttcctttatgtctatcctgttgctttcctgttttactataagacacaatatcactcatatgacgctctatatcaaaagcaatatccataccataaaccactcgcttattagacttcaaaactgcatttaacgtatgaaaaacggtttcaaacactttttcataactatctttttgcaactcgttattttcaaatttagaagggttaaaatcaactttcatatcatagctatctttttccttttccgaattatgtttccaccctatataaactgcaccttcaccatatccaatatgtataactctatgataatctctaacagacgtcccatgttctgacctaataggtgtattcggtaaaaaaatctgctttgacgatattttagttaaaacatcactaaattgtttctctgttacatctttatacttaatcattagcctatccaaataaacttgcataaaatctatcccgctccttattttttattaaacatgtcattttgtacacgattttcggctattagaatgtccgaaaatgtcttcgccacatttctacaatttacccacacattgaattatactgttcaatctctatcgtgacttcaaaaatttctaattgccctaaataagaactaatagcattatccaataaaaactcaacattctctggatcaactacactttcaccaggaactccaaacaactttacacgtaattcgctaattcttttcaaatcattcaattgtctttctgtcagtttcaaattgttaccctcactttctatcaatctgctcctacacctccgttacctcgccgaccgtacgctcttctcactcattccatttcgtttgccatcagttcacgcgccgtcgtgtcctttgagagtccactccgtcaccttaccttctgtctgcacttcacttcattcatgtcgctcccttaagtcgtctacttccggctccgtcgaatacacttaataaataagtgcccatttacacagttaactgccatgggtttcctttcagtcatacaacgttcacccaagtgaataataattacaactcatacgattacaaaagccgtttcctaattgttcagggacccatgcacggatattctaaatgagtaggtggcgggcaaacttcagccacaccaactacgcatttagtttatcgatgtgcatctcctaatcaataagactacattttcgaaacataaccgttacttcaactcaaacatattccctttttgattcaattgttgctgcgttacattttcaaacatcatactcaacatttgttgcatctttggcatttgttccaacataaccttttgattcacataattctctaaagctaaatgaactaaagtgcttttcggtacaccactttctttgctatactcgtccaaccaatcatttaactttttactgatacgtgtattaacacgaaccatttcactcatctaatcacctcttgtatatcgtactacataaatataacatcagtttaaacacaatatcaacactaagatacaccagaacaatgtaaaagtgggactctatccgctattaatataaacaagttaagaaaaacaaaaagagagcatcatattgacgaataacgttttttgacacttgggggtagtgcaaattcttaagttgatgggcatgtgaattaacccccagaatttaattttttcttctcctcccaaaactataaacttactatttgaagttccgattttcacttaaagcatttacatgtatcaccctctatttccaatatttataataatagtaatataaccgactataattgtatatattttacaatcaattcacctattacgatcatttgaatttcgatatataactataaaaaaagttattatgtctacataataactttttttcaccaatctactagcatagttctaaatatagaaaaatatcctaataatatttgaggaaaacatattcatataattttatttttgtatattaaaattatatataaatgctatactaagatgaatcaagaagcatccaagattctttgattaatcactacattttccttaaagcaaactcaacaagaaaagacactgtatagtgtcttttcttgttgagtttgctcctttaatcaatagtaagagaatatatatctataccttcttattgccgattggtattagaattgctgctcccacaagcagaatatctgaaagacactcatataagagtgtcttttctttatgtaaaaaattatttttaaacaaaaactctttataaaagaacacaggttcgtatataataagaacaaacgttcttttgatttaaggaggaatcacagtgtatgactattcaatcctaccgaatagaatcatcttatgtgttgatttacgtagcttttacgcttcagttagttgcattaaaatggggttagaccctatgcatacaaagttggctgtagtaggtgatgtgaacaggagcggatcaattttattagctgcaactccaccactgaaagcactgggcgtaaaaaagatggcaaggctttacgagattcctcgaagaaaagatattcttgttgtgaatccgattatgagtacttacataaaatgctctaattacataacggagttagctttacaatacgttccttatgaggatttccaccagtattccatagatgaatttctgttggacgttactgatagcattcatttatttgctaacgatccctatgaatttgctttgaaattcaaacgtgaaatatatgagcatacacgcattgaatgtaccatcggaattgctccgaaccctttaatgagtaaggttgctttagatattgaagcaaagaagaacaaagaaggtatcgcatattggaagtatgaagatgtcccaacaaaattatggagtatacgaccactcaataaattttggggcatttcgtacaaaacagaagaaaaattgaatcgaaaagggatacattctattggggatttagccaattaccctcttaaatacttaaaacaaagcttcggcaagattggggaggaattgcacttacatagcaacggcatcgacttcagccgtatttcggaaaaatacgtccctgctacaacttcaatcggaaaaagccaaattctaatgcgcgactatacaatagaagaattcccaattgttctattggaacatattgaagaagtctgttatcgccttagaagacaaaacaaacttgctcaaaccgttcaattctctgttggttatagcaagagttatacaggtggaattaggaaaacacatactttaaaccgtccaacaaatttaacaatggatatttatcatatctgtacatactttttgcatcaacaatatactggcgaacccattcgcagcataaacatatccttaacaaacttaattcaagaaggagaagaacaaatttctctttttgataatgtcacgaaacgagaacaagaagtgaagctaacaaaagtaatggatgaaatacgcacaaagtttgggaaaaacagtattttacgagggatttcctacacgcatagcgctacagctagacacagaaatacactaatagggggccacaaatcatgaataacgctaatatgccaaaaggaagaggaatggtgttaacaatagtataatatatgagtagagataacgtatacaacgataggtagttcttagagattggaacgattgaaacacataaaatcggggaacaaacttattcaacacaacgattacatcttgtgcaagaaccgacaccagcagagattattgttcgtagcttatctggtttagtaggttacgtgaaatcagaatttgacacaactgaacctgtaatgattcatattgtaaacccaacaacggtaagatgctttactgcggttaatggagataaggctagaagtacttatatcgaagcacaagcatccattccacgttttaattttggaagcttttatgacagagaagaatttaatattgcattgcaatcaggttttgtacaaaacaatcatcgagacattgttttacaggtagtaggtacggttgtcgaaaatgatgttaaggaaattggagatgatggtgtatcgcaagctgtaacggtgaaaacaggagttgcgagtagagggaatgcaaaagtacctaatccagtgcaattaagcccatatcgaacatttgttgaagtagaacaacccgaaagtaagtttgtattcagaatgcgtgaaggggcacgttgtggtttgtttgaagccgatggtggggcttggaagttagaagcgatgaataacattaaagagtatttaaaagaagctttagcgcaagaaattgagtctaaaaaggtgtttgttttagcctaatggatattacaacggtagaaagtacaacgaatgtctgtatctttggattagggattgtgatacttgcgtatggagtttataaaggtggtactttcattgaacgaaagtttgatgaaagtgatcgcttagaaagggaggctttaaaagatgggaatagaaagccgagtttttccggaacatctagaaaaggctttggaattagaagaggagcgtagagagtgtatacaaaatctgcatctgttatataaacaaatgaaccaggcaaataaggaaaggaataaaactttgtatcttgaattacataacgcttatcagaagcaaggtataagagatttagagatatcaaaacagttatcagctatgtattttaagaaacagaaaagtgatcgtgaagcagaaagagcagaggtttttcgtgtagcagatcgtcttgaaaaagttggtggcagaaaagaagtagttgaaagaattcgcaagaaagcataagagaagaacccgctgcaacgggtcctaaagaaaaaataataatacgtattataacaattaatcaatgttttgaaaataggagaggtaggaaatatgggtatttttcgagtgaaaaaggatacgaattattcggtgatacacaatacgcctttgcgcgatgagaacttaagttggagggcgaagggattattagcctacatgctttctttaccggatgattggacatttcatgctactgaattaagtcaacatgccaaggatagcgagaaaacaacaacaagcaccttaaaagaattgaaaaaggcagggtatttgaagagatatccaatccaaaattcagaaacaggaaaaatttcacattgggaaaccattgtttatgaattaccaaccatagataccaaaaaccatagggtggataaaccacctagtggtgaaaccactgagtggaaaagccaccctatggatgaaccacatgatggtgaaaccaccgagtggacgaaccaccctatggaaaaatgccgactactaaatactaattctttactaagtactaataatatacaaaatactaattattatcatgatgataataaagaatcaaaatcacatgtattagtcgatgaagaatttaaagtcagttataactttttaaaaggtgaaggaattccattaagtgaaattgccattacggaattaggagagttttgtgattcgtttggtagcgaactaattaaacatgctgctcacaaagctattgatgaaaataagccaaaatggaattacattaaggccattttgaaaagctgggaaaagcaaaaagtaaaaacattagatgatgttgctgcattagatagacgctttgaaatgagtaagaataccatcggcgctacggcgtttcacttctgagttcggcatggggtcaggtgggaccaccgcgctaaagccgccaggcaaattctgttaatctgtatcaggctgaaaatcgtgtctgtctcttcgccaaaacaccttcggcgttgtaaggttaagcctcacggttcattagtatcggttagctcaacgcatcgctgcgcttacacacccgacctatcaacgtcgtcgtcttcaacgttccttcaggagacttaaagtctcagggagaactcatctcggggcaagtttcgtgcttagatgctttcagcacttatctcttccgcatttagctaccgggcagtgccattggcatgacaacccgaacaccagtgatgcgtccactccggtcctctcgtactaggagcagcccccctcaattctccagcgcccacggcagatagggaccgaactgtctcacgacgttctaaacccagctcgcgtaccactttaaatggcgaacagccatacccttgggacctacttcagccccaggatgtgatgagccgacatcgaggtgccaaacaccgccgtcgatatgaactcttgggcggtatcagcctgttatccccggagtaccttttatccgttgagcgatggcccttccattcagaaccaccggatcactatgacctgctttcgcacctgctcgcgccgtcacgctcgcagttaagctggcttatgccattgcactaacctcctgatgtccgaccaggattagccaaccttcgtgctcctccgttactctttgggaggagaccgccccagtcaaactacccaccagacactgtccgcaacccggatcacgggtctacgttagaacaccagccattaaagggtggtatttcaaggatggctccacgcagactggcgtccacgcttcaaagcctcccacctatcctacacatcaaggaccagtggtcagtgtcaagctatagtaaaggttcacggggtctttccgtcttgccgcgggtacactgcatcttcacagcgagttcaatttcactgagtctcgggtggagacagcctggccatcattacgccattcgtgcaggtcggaacttacccgacaaggaatttcgctaccttaggaccgttatagttacggccgccgtttaccggggcttcgatcaagagcttcgcgttgccgctgaccccatcaattaaccttccggcaccgggcaggcgtcacaccgtatacgtccactttcgtgtttgcacagtgctgtgtttttaataaacagttgcagccagctggtatcttcgactgatttcagctccgtccgcagggacttcacctacatatcagcgtgccttctcccgaagttacggcaccattttgcctagttccttcacccgagttctctcaagcgccttggtattctctacctgaccacctgtgtcggtttggggtacgatttcgtgttacctgatgcttagaggcttttcctggaagcagggcatttatcacttcagcaccgtagtgcctcgtcatcacacctcagcgttaacaaggtaccggatttacctggaacctccgcctacatgcttaaaccgggacaaccgtcgcccggctgacatagccttctccgtccccccttcgcagtaacaccaagtacaggaatattaacctgtttcccatcgactacgcctttcggcctcgccttaggggtcgactcaccctgccccgattaacgttggacaggaacccttggtcttccggcgagcgggcttttcacccgctttatcgttacttatgtcagcattcgcacttctgatacctccagcatgcctcacagcacaccttcaacggcttacagaacgctcccctacccaacaacgcataagcgtcgctgccgcagcttcggtgcatggtttagccccgttacatcttccgcgcaggccgactcgaccagtgagctattacgctttctttaaatgatggctgcttctaagccaacatcctggctgtctgtgccttcccacatcggcttttcttcttcctcttcttcctcttcctcaacctcttcgatctcttcctctccttcctcttcaactttctttttagcgaagaattgtccgtctccaaatcgtaatagaaagggattttcttcaattgcttttaacatgtctgtcatttcgttttacctccttatcccattttggtttgtggaatgtttctatattttgttttaaccattcctttgtagtactagaaaaacgctctcctctttcaaccacttttaatattttagaaacttcttccttactacaattacttaaagctaaagtgattattgtttgatattcagctaattcccaacagattgcatcagacaattcttgacttgttttgaattctttatcatgaactttcacttcttacaccccttttgtttttctaaatacagtgtataacactatcgcaaaacacaatatatagtatgacgtgacacattgtgacaataaaacacaaataaaaaaagaccaacctaaaaggtcagtccgaaaattaaatgatgtttttctttctattactatttgatatttcattatgtaaaatagttaaaatgtccatgattgcatcttcgcttatcgtccgtttattatcataaatattttctctaacatctcttatcaattcaggcatattacgcaaatgaatgtttcttctcacttgtctatctaattccaaataccccttttcttccaaactccttatacaatacctcacagtactacgagaataaaatgtttcttcttctaattctgttaaagaaggactatacccatgtttgatttgaaaattttcaatagcattaaaaatagttttttctgtatcgttcatcatactttattcccctctactatgatttttttaattaactataaaaaacggtatctttatcaactggactttgcctctctcttataagttcaatagcttctgattctgtcaacccattgatgtacatttcccttacaacaaaaaaaccaggttttccgcttgggcttgcacccatgattttattaatgcgtttaatatcattaatcatatactttggtggcactttgcctttcccaatgatctgtttaaattcttctgacctacttatgatatctattgtgtcgttttttaataaacgctttgccccacttaaaccgtctgtttttaagacatcagccaaaatccccctttctctttttgaaagttcgcctgcatatctacctttaaaagcttttctctctcttctttctgcgttaataaatttattgatttctttttttgtcaaacttttattaccatcaaaaactttttcgactaaagaggcgtcgcctttgtatttaaataacatttcttctaatcgtactttatcgaattccccgtttttacgttttgaaatctttttggaaaatttaatatcaaaacctaactctcttatcgtcttataaagtgtctttttcttcttcttcatacaatcacctcattaatgtttctctctttctctctttgaataagaaacaatagtgtctgaaccttcacactccggacaacacaaaaaataattatgttttctaggattataattaattattttttcgttgatacacccacaatctttacaaataattttttgtttgtattgtatgtatggatatattttagccatgtctaactatcctcatatttctgttgcattgttttataaaagaaatcatgcaactcaataaatagcttgtcatcagctttctcaaagtaatcaatcaattttataagtgtttcagaagcgttttttgattccaatctttgtgacactttatcaaatcttttttttgctctagcgtccactgatatagttgttagctttttcaatttcaaaactcccttccataatgtactaaattacatatattaattttaattcatttttaattaaaagacaacacaatatgtcacaaaaatgagaataataggatgtgaccactcgcatggtagttatacaataaggaaatatttgatgttttacgtacagatgtagttattaaatctgagttaggtggagaatttatatatcaatttgttaaaggaaatgacaaaacagatatatggattacattttcagagttaaatagttctcctgggctatatgcagagaatgaggaaaaaaccactaacgttatgtatcaggttgatatatggtcaatggcaccaatcaaaacgcaattaaaaagtgcagttcaggcagctatgaaaaagctgtcttttcagcgtttaagcacttatccagattatgaaatggatacaaaaatttatcgatatggttttcgttttgtaacggaaattattaattaaggaggaaaatgaaatatggcaatgacaatagattttagagatttacattatgcggttttaactgaaacatcagatggtaaatttaattattctacaccaaaacgaatcggtaaaacagttagtggtaaagcgtcacctaaagcggaatcagtaactttttatgctgaaggtggaccagcagcaacagctagtgcatttggcggtacagaaattgaattagaagttgatacattacctttatccgtttatgccgaattgttaggtaaaaaggttgtaaaaggtcaagttgtagataatacaagtgatgttcctccttatgtagcattgctatatcgtttaccatacgacaacggaaaaaatctatatgtatgttattacaaaatgaagtttgagcttccaagtgatgaacataaaacagcagaagataaaccaacattccaaagcgcaaaaattaaaggtaaggcaattcaacgttcggacggtaattggagacatcgattagatgaagaggaagaaggacacgatgcagcagttgcggcaaagtggtttaaagaagtaccagctccaccaatagaaacagccccaccaagtgggaagtaattaagaaaagggatggcgaaatgccatccttatttttattaaggaggaaacagatgatgaaaatcacattacaaaatacagaaggtaaaaaagatttttatttaccacaatttatcccaggttcagctacttttgaagcttcaacattagctgatgaattacaagcggacttagtaccaaaagaaacaattgaaagagctgctaattttgttgccagtgtgtacggaaatcaatttacagcacaggaatttgtggatggcactcatgtatggtttttaagtcttacaattcattctgtttgtttaacaattatggggcgcctaaatgatgcgattaaggtaatggaaacggtagaagatgcgaaaaaaaagttaatggcacaactagaaatgaaaccgacggaggaaaaatcaaatatagcgacgctgtaattgatatttataacatattgatggatgcaggtatgacacaaaatcaaatcaatgaaatggatattgcgttttactttacctgtttagcgagaaaacaaaaagcaaatcgagtgacaacagcagataaagtaccaatgtggttgtaaaggtaggtgagaatttgaatggcactaggagataatacaattggtggtcgtgtccgtttggatacagatcaattcgaaaatgggattgcaggcattaatagaagtctgaaaagaatagacgctgaatttcgtaacacgtctgagcagttacgtggagttggttcagagatggatcaactggagaataaggcaaaccatttaaatcaaaaaatagaagctcagacgcaaaaaatgaagcattatgagcaagctttgagaacttcacaacaaaaacaacaagaaatgcgtcaaaaatgtgagcaattggctacatctatgcaacaattagaacaagagatacagcaaagtactcaggcatacgggaaaaatgctcaagaaacaaaagatttgcaagctcaatataatcaattacagcaagaatacaaacaaggcacacaagctttacaaagattaacttcatttgtttgttttgtggtataagattgtacgttgttcttcttagatttaaagcgcggtgcgctgttttgttttttgaaaaagcgtgtataagcatccgcaaggttgcgaacagacgactgaatcgcaatactatccacttcttttagccaaacaagctctttcttcatggcaggtagtttggcagagcatgtaccataggtcaagccttttcctgtctctttgtatgcttgatcccataaggataggaaatgattgaatacaaagcgagaacacccaatcgttttgttgattagaattgcttgtgcctgatttggatagatacgaaacttataggctttattcatcattatttgattcacctccatttcggtatatgactattatacaccaaacgtacattcgataggtagtggagtaacactttctgtatgtcgaacaattaagatggcttcctgccatcccttgttcgaagccaattcatctcccacctactcactgggctgtgacccttcacgctccttgaggaaggagtcttcttggctaaaataataaataaaaaaagaggatcgccccatactagagcagatcctctctttcacttcacatacacataggcttcgtttgctgctatataatatgttttacctttactattgtgcactctatattgtggtgaattatttacaattacctttgtatcaataatgaatcctaaacccatatctacagtaccggcaacatctttatcctgccaagatggagaatcatagaaacgtaaattatttacttttgaaataactcttttaccaattactgtagcaggctcattaccttggtaacgaatatatgaagaatcataataaatccattgattaccaccaagatgtaaccagtttcctaatttaccccatactttataagcctcacctttttgtagcttacgaataatactattttctgttgatggtccaaagcggagatttacattgtatccttcaatatatgcaataccattcgactctactgtaccagatatttcatttgttgtttgtggtttggtatccactgtaaccgtgctccctttataaacctttaacacgtctgctcggaacttagcctcagatacgccatgactacgaagataatctattggatcttcatggtctgtcccacctaatttatacgtaatatccctatgtgtccataatcctttagagggatgaatatttcgttctcgcaagatttccccaattaattctatatatttttcatatgaacgtttaaatttcaatggatcacttgtctcacacaattccacatgaacaaatctagcatttgctgctggacctgccccccatgcctgatgttttgtagatgcaatttgaatcttctcatcccaatccactgcgtagtgaacaaacgctgaacgccatgtacgagactcatacttttgaatattaattgctggcgcctctggggtagctgtagaatgtgctacaacaccttcataagctccaacaccataacggtatggttgttttggtaaatcaggaataaatagaattctatcagcaaatacatttgtttcaattgataatactaaaataatagcaacaactatggataaaatatgcttgtatttctttttcattttctatcggcatccctttttataatttttgtatggtcaaataatccactagctgacaatccgataatcattccttgaaatagattcattttaatatcttgagacaaaaataaaacacctagcgtaatgccaagtgttaaattaaataacggaatatattttgtttgcagtccagttgtttttgcaatttgtgaaatccctacaacaaccccaatcattgctgtaatttcaatcattacatacctcctcctcgtatgataaagttaggttttttaggaaagggatttacctataaacccgtgatcttgcaatcgattttaaaaaatcaagcatctggaatagatgaagatgaaaaacgtctaaatgatgttttagagcaagtaagacattttaaacaagtagaatcggatggaataataactgtatcagttccctcaatccctacatggattgctggaggtgtaatgataggggtagcaagaaataatttaagtacgctggaaccgctattagcgcaattgcgccaaacggtagactataaaattacattgaatcgtgtagttggagttgcgtataataatattgctgaaatgcaaaatgcaattggatcagctattaatgctctcacctatatgtcagcacaatggcatgatttagattctcaatattcaggagtacttaatcatattgataaagcatcccaaaaagcagatcaaaataaatttaaattcttaaaacctaacctgaatgcagcgaaagatagttggaaaacattaagagcagatgcgtttacattaaaagaaggaataaaaacattaaaaatggatcctgtttcttcaaagaaataggaaagtatggttttattgttaagttttctaaaatatagagattttaaaaacatactgttaaataattaaatgattcgttatatatagaaaaggtggagttgtattaaggactctaccttttttgatgatatgcttctaatgagctaaaactttttgttcatttatttacaagaaggtgagattatggtgtatgtcattccatacgacagattcgctagggatgatattagttatttcttagcaaagcattacgaggaaattggttaatgcgttttggtgatgataatgaggagctcgatgcatttaaacagtgtatcttcattgggcgtaagcgtgctgctaagaaaaatgatacatactttaacgatacgctaccctatatcgatcaagctaagataaacggaaattttgtgttttttatagtatcaggtccatttttgttgttttgggggcacttcaaaatgttagctttatgggcatgaggctgtaaccaaaacacacggttagttagatggttgttcatctgaattttctattaaattaatctcaagtttatgaagatatcaagatttaatgttgtgtgatagtatagaagggaaaaaatatagataaatttggaaaaggaggatgcaaattggatgttcaaactactataaataataaagttactgaactgttaaatgcctggtatattgaaattcgaaatagaaatgttgcgaatgcatataaataaaaaaagaaattgagagttctatagaaaatattgaagaagaccaaaatctattactgtattattcattacttgattttggttataaatatttaatagataatttgagtgtagctaaaaatagttttgatcaaattgaatcttttaataaaccaactgacgatttcttatcgtattattatcatttttataaagcaatctactctaatgcagttggtgactacaatgcagccaaagagcattatgaaatagcagaaaattcacttaaaaatattccggatgaaattgaaaaggcagagttttattataaccaagctgtgttccaatatcattactatcaggcttttgtggctttccaacaagcaacaaaagcaaaagaaatatttactgaacacaatgggtaggaagtgaaaatcggttattgtaataaccttatggcgttagcttgtacgtatttgaaagaatgggaattagctgaagaactttatatcttttgagcgttttccgtgtgcatcaagtgagtatattgttaattttatctgtattcattttttattatgaaacattttaaggttgataaagttttattgtgtgggattattaaataaaaatgataaattgtaaatgtcaagataaacatgtacattttcgcttgtttaagcatgtacaaaatcttgacatggcatcccacatgctgtttaccccattcgcaccttctttgaaaagaatcgttgcaccacgtacagcatccgatccgaataacgtttccaaagccatacttcgttgctggtctgttaaatctttcattgattcatgaagtgttcctgaaatattttctaagctttgaatatgtccttgttgatcatagaattttgatgataggaacgctgaacttgtagctaattcacggaatgttgtatcacacttgtcattccactttttcgcaccttctattttcattacatagccttctaaagcttgctcaatatcaccgacgctccttgaagctggttgtataccgtttttaacaagaaaatcatagccagcttgtgcattataagtaattaaccctaaatccctcatttggttatatgcttcttttgttgttggatttaatcgcataagcattgtttttaaagaagtacctgcatcagaaccttttaaaccattttgtgcaaaaaccgctaacgtagtagctgtatccttaaatgtcattccagctcctgctgctactgctgatgaagctgaaagaccgtattttaactcccgtacatctgttgctgaagcattagccgctccagataaaatgtttgctgcatccgcaacagaaagatgatctgctttaaatgcatttaaggctgtggatgcaatctctgccgcttcacctaattctagttctcctgctgtcgctaagttaagagcaccttctaaaccaccatttataatatctgttaaactaactccagcttttattaattcctctataccttgtcctgcttgaacactagagtattttgttgtttctcccatgttgacagctaattcgcttaatttcttcatttcttctccagtagagccagatacagctttcacattggccatttgttgctcaaaattcatggattcttctacagctgattttaaaccccgacctattgcataagtcattccgccaaacaccataccgatttgcataccagcattttgcaaatgattacctaacgtctccatacgagtaccgaagtttaataaacgatttccttgttgttctaattcatggttcgactgacgtaattcgttttcaaatcgatttaattcacctgttgcccggtgaatttgttcggcgtaccgctgcgctgactgacttgcttcaccttcttcagttttagcacgattataggcttgttgaagttccctgatcttctctttttgtttatctaccatacgagataaaacatctactttagctcgtgtttgttctgtcgcattagaaaaaccgcccatgcctgttgtgatagactgaaattcagcctgtagggattttaaagagttgtttaacttatccatccctttttgttcagcttgacggtttacttgctttaattcattttcaaatctatttaaatccgcaactgctttattcacttgcgaagcatatcgctgggttgctgcatcattttcacctaatttagccttattttgatcgtaggcttgtcgcaaagctctgactttttctttttgtgcttcaataagcctgctgagtgtattcattttcgcttgcgtttgttgactagcatttgcgaagccacccattcctgtacttacagatttcagctcattctgtaatgttctaaccgcacgtcctgagtttgctataccttgacgaaaattcacattatcaagggacagcctaacgactaaattattcatttcattcgccatcatcttcccccttattagataatgttttctgctggaacttccatttcatttaaattctgatttccactatttgaatgatcttgttcacgatatttttggtttagccttaaataatgccagatatccatttccaagcagctcaccccataaacttcatcaaaagggttatgagacctatcaaatggcagacactttcatcggaaactctctgcacttttcaggggaaggactttccagtcccagtaaagccccagtacaccatagagatattcgttactccatctctgccatccgatgctacgctttcgtcgtcgtttccttctcgttaacagtgtgcgaattttcatctccgtataatcacgtacttcactgaaagcttgactagagttcccaacccggaagtagttcacccatccagtcagtacggcattgatttgttttattaagtcttgtgctggcttcgctcctgcgttttgaatgagttcgcgaatttttgctttcactgtcgtgcgagctttcttcttcgggatcatgaaaacgaagaatccattcttatttcggttcggtattcgtctcaggtcaaatcctaaaaatccgaaggattctccttttaggacattgaccatctgagtcttctccagattcagttcaactcccaaaggctttaactgttcccacagtcgtcgtaatgccagttcagcccatccacttttactggagtgtccgcttacagcgataactatatcgtcggcaaaacggtgatagtttacagcttcgtaattgccatcagctgttttacgtcgaatggtatcaaatgtccaatccacttcattgaggtaaatgttcgcggctagtggagaaaatggtcccccttgcgggacaccgatctttcctgttgccttaattacctgttttacaagatgcataacctgtgggtcttggacacgtttcgcgattttctccaataatatgttgtgtcggattgtatcaaagtagcgtgacaaatcaacatcaattattatggtcatacggcgcaatatactgcgtcgtacttctgccaatgcctgatgtggagagcgtttcggccgaaacccatacgagtttggacagaaatcagcttcaaaaattgcttctaatatgagttttagcgctccttgtactacacgatctcgtatacacggaatttgcagagttcgcattttgccgtttgtctttgggatttctacttttcgattggcttgtggttggtatattccagcttgtaattcttcttgaatacccgttaagaatgggataactccttctagttctatatcagcaaaactttttccatcaatgcctggggcaccattgtttttcctcgcctgttgatatgcttcgtgaagggttgtaattttggtaatgtgggtaaatatcccccaaaaccggtgcgtaggttcagacttcgcctttcgatagattcgttgccttagttcctgcaaagtgatgggtgtttttgtcatagcacccttgcctcctttagtcatacgaaatgtttacaggttcggatcctttcctccccgcgtgttttgctgcacgcagatctctggtactacgatccgttccgccaccctgacacctaccgttctcacttcccgatcgcggttatagagacggtctcctcgatgagatttcttcatcgggtgtcgagggcttctccagtttccacattatctttctctccatgtcgccgctgataccccgccggtgagaactgccgttccagactcgtttcggtcagttcttgttgctttcgcacgttatcgaccgtctcagccaccggaattgcgtgtaacgaggctacatctacgttcactgtacgttacaacctggagatttgcccacatgccttttgcatgtgatgtcagagggcttcgccatgtcgctttcacttcatggcgcctctcaggctacgggagtggagtctattctcccgattggactttcaccaactagataatgtgtccttatctggacacgccaattagagcaaatgggtttacgtggagaaaagattgaagataaagcccttgcagcaggtggcgagcctattcgaaaagctatttctgaaatagctccaaggagtgatagccctaaaaaagcaacaaaaagcgagccgtggcgaacaggacaacatttggctgataatatacgggttacaaaagcaaaaatggagggcggcataaaaacaatcaaaattggtatagataaagcggatcgttccccctatttctatggaaagttcttagaatggggaacttctaaaatgccagcagagccatttatagaacctggatttaattcttcaaaagaagcggcaattcgtgctatgacagacatcttgaagaatgaaatgaggttgaatatatgatgaatttacgccccgaaattgtgcaagctcttgaaaataatcaggagcttgtttctttattgggtggaaaacgtgtttattatcgtaaagctaaaaatgctgaagagtttccgcgtattacgtttttcgaactagacaatagaccagatcgttttgcagataacgaggaaagcgaaagcgaaattacatttcaaatcgatatttggtcaaaaggcagtacaacagcaatccataaaaaagtgaatgaaatcatgaaaagtattggtttttcacgctatgcggttgctgatttatatgaagatgatacacaaatttttcattacgcgatgcgattcgtgaaaggagtggagttatagatggctggagaagttattaaaattagttcgactgtcggtgtagatagtcttgtttatgcgaaatcggtgaaagacgatgcaactggagtggattatgcaaccgttaagaagttagaaggtgctgtaaaagttaaaacttctaaaaaggtgtcttctgaaattatgtggagtgataataaaaagtcagaaatcgctgagtctgatggtgaagttgaagttgaaattgaggttcgaggtcttccattatccacaaaagctgatattgaagggtatccagaagttacagacggtgtattagatgaaaaacgtgagggcgaaaaaccgtatgtagcaatcggatggcgctttttgaaggcaaatggtaaatatcgatacgtttggttgttaaaagggaagctttcacaagaagaggaagaagctgaaactaaaaaggataaaccgaacttccaaactacgaaacttaaaggttctttcattgaacgtgattttgataacagatcgaagtttacagcggatgaagatgaacctacatttacaaaatctgttggagataactggttcaaaaaggtatatgaaaaaccagtaacaccaccaacaggaaagtagggggagcaaaagctctctctcttttttattaacgaggaggaaaagccatgaaattaacactaataatcaaggaagaaaagaaaaattttcatttaccggagtttattccagcacgtttaattcgtcaagcacctgaacttgctgatattccaaataatccaggtcctgaggatatggataaaatggttcaatatgtagtaaaagtttacggggaacaatttacattagatcaatattgggacggtgtggatgctcgtaaatttttatccacaacttccgatgtaattaatgcgatcatcaatgaaactgtgggagcggctggtggcacaccaggaactggagaagaaacaaacccaaacgcgtagagggaggggggctaacgttcagtgagtttatggacgagctctacctctctttattacgtcaggggtataaacacatgcccatcaacttaagaatttgcactacccccaagtgtcaaaaaacgttattcacaaatgtgtagcatcctagcccgagagggctggggtagctactaacccttacgggtcgcgataggtaaagctttgaagttatctctactttttcccccgccccacaccgtgcgtgcgactttcaccgcacacggcgttccatcggttcagattgataacccctaacaaatttagttagtatcatccttattctttgcctcgcgattaagataaggtgaacaatgagatatatttcaaatgtgtagcagctcacggtatttctttagtttcggtagtttgtataagatactgtcttctaagtccttttgatgtataagcttatggcatcttatgcacagggtggcaagattgctgagtttgttgattttctctaaaggtagtcgattattaacatgatggcaatgtatgttagttggaatcaaccctgtcttacatattcggcactttcctttgtcacgattatatgcataatcgcgattaagtatatattcaaagttatagagtcgtttatttttagtttgtctaagcatctgatacaagaccatttggttgatttggtcgttcgaataaatggttggtctcattttcttatcgaccttaccatgtcttctcgaataaattgtccttcctatctgtgtatagggggtcgtatcataattgtataggagtgctttagtactaggtgtaaaactcattttggttaatcctatcttaactccatcaacttcaacgaagggtactttggttttatgccctttatgcctatctttacgattatcaagattttcagctggagtaagcattttttcgaatactcctccaccatgtttgttcttaatagacttgtagaatgtatagcgtattttgtcatcgcatctaacgaaaattctagcagaatttcctatacggaaataattactaataccaataattttggtgttaataagttctatttgggcggcaacatcgtgagagctggttgttttccgaacattgtaggtatctcgaaggatttctctcattttagagtttaatttctttttgttcggtatagcttttcctgcaatacggtttttcagtctcatcttttcagctctgatgtcgaatcctaggaattgggctggcttctctctcatatcggtaataaatgttttctcctttgataattctaatttgagtatatgtttgtaatacttattgattttagtcaagagtgttcttgcctgtactttatcctcgcatagaattatccagtcgtcagcgtatctaacaagaaaacatttcttatgttttctaactacttttctaagtcctgtactgaaagcgtgtttaacagtataacgcgcgtagtgttcttcgaactctttagctatcatccagtcaaagttatttaagtatatgttagctagcaggggagatataattccaccttgtggagttcccaactccgtagggaaaagttgattatcttctagtacacctgcttttaacattttcttaataatggttaggaatctcttatcctttatgcccatattccacattatttcaacaagtttattatggttaatatggtcaaagaaacttttgatgtcaccttcgatggctacgtatgtttttgacctagaaatggtattcaagattctgcctattgcatagtgacatgaacgatagggacgaaaaccgtaactatggttgaaaaacttcgcctccgctatgggttctaacaccattcttgctgtttcttggattatcctatctatcatggctgggatcccttcatgaatcgatgaaagatttaacagaccagcaacgtagtatggctttagagacactctttggttcggatgctgtacgtggtgcaactattcttttcaaagaaggtgcgaatggggtaaacagcatgtgggatgccatgtcaaaagtgacagcagctgaggttgcagccactaagattgatacattaaagggacgtcttacattactagattcagcgttttcgacaatgaaaaagacaattggtgatgcgcttgcccctgtggttagtgtttttgttgctggattgcagaagcttgtagatggatttaactcattaccagggccagtacaaaaggccattgcaattacaggtggtattgttcttgcgctaacagcggttgctactgttatcggagtaataatgggggcaatcggtatggttgtttctggcattggttctttagcaatagcaatgggtgtagctacagcggctactagtgtaacgggcgcagttttaggaatattaaccgcagctttaggaccagtagcaattgctttaggtgtggtagcggccgctgttggtgttggggtattagcatataaagggtatcaaaaagcaactgaagacagtattgcttctgtagatcgctttgctacaaatacagaagggaaagtaagttcttctacaaagaaagttcttggtgagtatttcaagctgtctgatggcattagacaaaagttgactgaaattagattgaaccatgaagtaataacagaagaacagtcgcagaagttaattggccaatatgacaagttaggtaacacgattatagaaaaaacaaacgcaagacaacaaaaagaagttgagggacttaaaaagttctttgcggattcttatgtgttaaccgcggaagaagaaaataagcggattgaacaaatgaatcaacattacgaacaagaaaagttaaaaacacaagaaaaagaaaataaaatcaaagaaatcattcaaacagcagcaaatgaaaagcgtgaatttactacatctgaaaggatttctttacaagctttacaagacgaaatggataggacagctatccaacatatgtctaaaaatcaaatggaacaaaaggttatttatgagaatatgcgagtacaagctagtgaaattacagctagacaagcagcagaagttgttgaaaatagtgccaaagcaagagataaggttattgaagatgcgaaaaagactcgagatgataaaatcgcatatgcgatacgtctacgagatgagtcaggaacacttaataaagaagaagcggatgcagctatcgcagaagcaaatcgtcaatataatagcacggtttctacagcaagagataagcataaggaaattgtaagtgaagcaaaagcgcaagcaggagaacatgcaaatcaagttgattgggaaactggtcagataaaatccaaataccaagtaatgaaagatgatgtcgttcaaaagatgaaagaaacttggtcaggtataacgaaatggtgggaagaaaccaaaacttcagccgacaacaaggtggaagaaataaaaaatacagtttcaagaaaatttgaagagcagaaaaaagctgttaatgacaaaatgcgggagataaagagcgatattgaagataagtggaatacagttgaaaaattcttcagcactataaatctacgttccgtcggtaaatcaattatagaaggtcttgaaaaaggtttggatgatgcgacaggtgggttatatagtaaggtcctcctcgtatattaatatttaagtcctatttcagacttagattttttctttaataagagtcctgtaataaataaaatacttggacgtctcaagatatttctagataatggtcttaggatcatttgggacaattcttaccgctcctgtggacttaccacataattaagagtgtttctcagtgaacgtgcgggactccctactcgcaggctgagcagcctgaccctcgaacctagatgatagtagctctagggcggctttcgattcaggacaagctctcatacacgaggttgttggtcggcgtacacactagagatatctcgagacgtccaagcaatgattctaaatagaagggaggtctcttacatgagattatttgttggtttagatgtaagttcgtttgatataaaagcttgtattttaaatggtgaagggaaaaagctagattccttttcggtcaacaacgacttgccaggtgccacagcgctcaaagagcgagtgttacagtgtatagccaaccaagaaattgaaacttttaaaatcggtctagaatccacatctgtttatagttttcatccatctatgtttcttcattatgatgaagacttacaacggtttggggcaaaggtatttctgatgaatccaaaacaaattgcaaatttcaagaaaagctattctgacatggataaaacagatgagattgatgcctttgtcatcgctgattacttacgatttggacggaatcaaatgtccatcgtaaaagaaagtcagtatgtggcactccagcaattaacaagatctcgttatcagctcgttagaatgttgacaaaggaaaaacaacattttctccaacacctaagttataaatgtaatacgttctcacaagaagtggattcttctatctttggcaacgccatgatggaactatttcttgagaaattcagtctagaagagctagccgacatgcctttagaggaactcgctgagttcctacaaacgaaagggaaaaatcgattcggtgacccgaaatgtgtcgcatcaaccattcaaagggctgttcgctcttcctatcgtttggataaggtcgtagaagactcaatcgatgttcttctaggaacatcaattgcggtgattcgtacctatcaacagcaaatcaaagaactagaaaaatccattaagcgaatcatggctggattaacgcaaacacttgagtccattcctggaattggtcctgtattcgccgccggtattatcgctgagattggtcaaatcgaaagatttgatgatgaaaccaaggtagcaaaatatgccggattatattggcgtacgcaccagtctggtcgattcaccgcagaaaacacttcgttatcccgtaatggaaatcattacttgcggtattacttagttgaagccgccaactctgtaagaaggcatgtatctgattatcaagaatattacgtaaaaaaatataatgaagtaccaaaacatcaacacaaacgtgcactcgttctaaccgcaagaaaacttgtgcgattggtggatgcgctactacgtagtcaccaactctttacgccagaaaggtgcgtgaaagtgtgacataaaacttgtcatcgctacctttcaattattttccagtaaattacatatattactggtttagtttcgtgatgtcttttttaagcaaataggcctttgataactttaaacgtttatattttttagttgacatattaccgcaggtctaccccttgctttccctaattatacaagaaatcgttataaaaacaaattatgaaaaaagactattacgtttatcccgctatccttgaaaagtcttcagatggttacggtatttactttccagaccttcctggttgcgtttctcatgcagatacacaagaagacgctttaaaggaaggtagagaagcattaggacttcacttatatggtatggaaaaggataatgaatcaattcccgaaccgacaccaattgataaattagaattagatacagacgaaaattcttttttaattgatgtttggatgccaccacttagaaataaagacaaaacaacttataaaagaaaaaatgtaactcttccttcttggttagaagaatacgcaactcataaaggcgttaatttttccgagatccttgtagaaggtttggaaatgcatttgggcattaaagataaaaagaatacaccataaaggacgccatgagcgtcctcttttttatataagctatttgtttactcatattcatttttttattcttctttgaaccgacactatagataggcacgtatcagctcaaagaagagcaaaagctctccttatggaccgtttaattattttgtattcctgcataatcacaattagattctaaagttctctttgtaattatttacttgccctataaacgccagttcattcaaacagacatccataaagctttattcggtaaccaacccattcaaattttacagttactattaaaaatagaaaagagcaaccatgcaccagtcgctcttacgtaaaattctatgctattactataattcattttttcaatagataccatatgtaaaacttactgtaagaaaagtgtaagttcctcagcaagctttatccttctagaaatttcagcatgcttctgatatacataactactactatagcctaattccctagctatagattctaatgtttttcgttgcacatacttaccaaatagaattttattttctagtccttcaaacttaccaattaatattttgaggtcgtactgatcgttcatcttattcgctagttcatattctatagccgctatgtgttcctctattttcgcaccatctgaatcagcagttaacttatactttgataaatcaccaacactccaacgcattaattctcttttacttctatgcaatttattttctaaataaatgatttcatcttccaactttttataatctttaaaccattcaaacaagggttggctcacctgcttcctctttcaccatgtaaactcatttcttcatgttacgtttatttaactgttttcttaaatgcccgtaactcacattaaactttttagcaatttcaatatatttcattccatgttctttaagtttcatggtatcttcacaaattttattccattcgtcttctgttctttgtatggatgttttaacaaaaactttaccacccaaaacaacccctatttcattcaatctcttccctacttcacactttgtccaacaatacacaaaatcacgagaacatttattgtcacactgacggcaatgattatctgttaatcctagtatttccaccctcgcttcttttggactcatatagtaaccattcctaacttatctacatgatataaataatcaacaggtgctctattagtttgtggtactatatacgctcttttctcaaattcctctcttggaatagactttcttcctccttcatttgtttgttttgtggtataagattgtacgttgttcttcttagatttaaagtgcggtgcgctgttttgttttttgaaaaagcgtgtatacgcatccgcaaggttgcgaacagacgactgaatcgcaatactatccacttcttttagccaaacaaattctttcttcatggcaggaagtttggcagagcatgtaccatatgttaaacctttcccagtttctttatatgcgtgatcccatagggataggaaatgattgaatacaaagcgagaacaacctatcgttttgttaattagaattgcttgtgcttgatttggatagatacgaaacttataggctttattaattatcatttgattcacttccatttcggtatatgactattatataccaaacgtacattcgatggatagtgaagtaacactttatgtatgtcgaacaattaagatggcttcttgccatcccttgttcgaagccaattcatctcccacctactcacttcgcgttccttgaggaaggagtcttcttggctaaaatgataaaagccttcctaattataggaaggcaacgttctaaaatgaaaacctatatttgattactaattaaattacctcaaactgataatatacacttttcccattctccctagttactttaatttcagcaaatcctttaccaatgacatccattctaacctttccattgccctgtactgtatatttgacaactttttctccatctattgttgtatgctttgctgcaactccatcttctgttctagattgaccaacacgccaacagtcactgcacttttttgtgctcttagatatcatttcattttttacatgtacgctgttagtagatgcatcagcaataccatttgtactcaacaaaattatggaagttactaaacctattcccagtttctttaacattatttcatccctcctgtgataattcataattttatattaaactgagattctttcaggtaactttcatttaccttacaataaccttaaatccctttctgtagatatcgaattctttggaagaaagaattcacattgtttatattgattttttaaacatggccatgtggattgcccctacattattagctatatgtacctttcagttcattttctgctattagttcatgtgttaaatagatcaaatacataatgactgagagaattagataactagcagttttacctttatcagcaattaaatgccttgcttcgactagaatcacttttattattaacaaaatctcactagctcaaatgtaataacttatgagtataagaatattttctgagctttaatataatgtaaaattagtaagaaacttatttcatgaaaaaatgttaactattaaagaattagaagtgattatatgaataaattattactatcgtgtttattagctatattctgtctaaatatcgcaggatgttctaatgatatgactatactaaaggatagttctaaaccttcaacacctacgaaggcgaaatgcattaacaaagcttggtacaaaaaacctatgccatgtaataggttatgctaaagatcataaggcgaatatgaatgtatatagtaaacaacatataaaaacattgtaattaattgttgtaaatctacctaaaaagactatcaataatgaagtgcaccccaattgttagacacataactaacaattggaggtgcattttttacctcgtatagtatgtttaaacttaatttttttactttcatgagagacctgtaaaataactcttggacgtctcaagatatttctagataatggtcttaggatcatttgggacaattcttaccgctcctgtggacttaccacataattaagagtgtttctcagtgaacgtgcgggactccctactcgcaggctgagcagcctgaccctcgaacctagatgttagtagctctagggcggctttcgattcaggactagctctcatacacgaggttgttggtcggcgtgcacactagagatatctcgagacgtccgaggaatgattctaaatagaagggaggtctcttacatgagattatttgttggtttagatgtaagttcgtttgatataaaagcttgtattttaaatggtgaagggaaaaagctagattccttttcggtcaacaacgacttgccaggtgccacagcgctcaaagagcgagtgttacagtgtatagccaaccaagaaattgaaacttttaaaatcggtctagaatccacatctgtttatagttttcatccatctatgtttcttcattatgatgaagacttacaacggtttggggcaaaggtatttctgatgaatccaaaacaaattgcaaatttcaagaaaagctattctgacatggataaaacagatgagattgatgcctttgtcatcgctgattacttacgatttggacggaatcaaatgtccatcgtaaaagaaagtcagtatgtggcactccagcaattaacaagatctcgttatcagctcgttagaatgttgacaaaggaaaaacaacattttctccaacacctaagttataaatgtaatacgttctcacaagaagtggattcttctatctttggcaacgccatgatggaactgtttcttgaaaaattcagtctagaagaattagctgacatgcctttagaggaactcgctgagttcctacaaaagaaagggaaaaaccgattcggtgacccaaaatgtatcgcatcgaccattcaaaaggctgttcgctcttcctatcgtttggataaggtcgtagaagactcaatcgatgttcttctaggaacatcaattgcggtgattcgtacctatcaacagcaaatcaaagaactagaaaaatccattaagcgaatcatggctggattaacgcaaacacttgagtccattcctggaattggtcctgtattcgccgccggtattatcgctgagattggtcaaatcgaaagatttgatgatgaaaccaaggtagcaaaatatgccggattatattggcgtacgcaccagtctggtcgattcaccgcagaaaacacttcgttatcccgtaatggaaatcattacttgcggtattacttagttgaagccgccaactcagtaagaaggcacgtatctgattatcaagaatattacgtaaaaaaatataatgaagtaccaaaacatcaacacaaacgtgcactcgttctaaccgcaagaaaacttgtgcgattggtggatgcgctactacgtagtcaccaactctttacgccagaaaggtgcgtgaaagtgtgacataaaacttgtcatcgctacctttcaattaatttccagtaaattacatacgttactggtttagtttcgtgatgtctttttttagtaaataggcctttgataactaaaaattcttttgtttttcagttgacatactaccgcaggtcttaaataacctaaatctcggatacataaatcatttgctgtcacagttggggcacacaaagagccgtaagtgcgatcatgttgtttacctggacctgtatgaatatgaaggaactgtccacttaacaaatcatactcaagttgaatttttatcccagctgtatggctacatcctcctgcacctggataaaccgatgaaaatacatcagggagttgaaatgcagttgaatctaaaatacgaatacgcttaaaaacagaagtatatggagaagaaatcggtatagatgaggtcaattttcggcttagtagttcagctagtatgtgttgtagaaattggacggctgctttattaaatcgttggttcagtccctcgggactgatgagcacttctgtcgaggcttctaaacagctagataactgagttaaagacgtcgtagcgatattttggttcatccatacacataaagcgactaaatcttttgcttggtacttactggttcgttgtacgaaaccaacatctcgagcaagattccgtaaggtatttggagataaaaaacgttgaatctcttgagcaaatagttgtaattcatcagaaacagacataaaaaacgccatcctttcctatgattctacagaaagaatagcgtttttttctctttatggatacatttttttagctcgatagcgatgtggtgttacctcaaatataattattttatttgaaggtcccttttaaatttttattaaatcttttcataggttgatatacaaggacgtgtaatgataaacctatcactgcagtaatgttcaaaataatacttataatcattaaagaccattctataactggagaaaagtatccgttcgtgcttaatgtagaagaactgatacctagtagtaaaatcactattagtaaaggtaagtttttaaccaatttgaatcccccttttaaatataatatctttatattattatatcacactggattatgtaattaatataagatagttatctatgagaatttaacatattttctctttttgggggtgacctacttctttagcttgatagcgatgtggcggtaccccatgcccatcaacttaagaatttgcactacccccaagtgtcaaaaaacgttattctttctaaaaagctagctagaaaggatgacattttttatgaatctttcaattcaagatgaattacaactattttctgaagagctgtatcgtcatttaaccccttctcttttggaagaactcgctaaagaattaggttttgtaaaaagaaaacgaaagttttcaggaaatgaattagctaccatatgtatctgggtcagtcaacgtacagcgagtgattctctcgttcgactatgcagtcaattacacgccgccacaggcactcttatgagtccagaaggactcaataaacgctttgataaaaaagcggttgaatttttgaaatatattttttctgcattatggaaaagtaaactttgtaaaacatcagccatttcaagtgcagcactcacgtattttcaacgaatccgtattttagatgcgacgattttccaagtaccgaaacatttagcacatgtatatcctgggtcaggtggttgtgcacaaactgcaggtatcaagattcaattaggggtaccgccagcatttcggaaaaaaaccacgctaaggattttttctataaaaagcaggaaatgtaagcatttttgttgcttctctatataattcatcttcttccattctcttgttgtgtctttgtaatttttcttcaaaatcttcagatttacttatctttatcattctgtctcacctttatctaaaataagaattttgtaaaaaaattaataaattctccagcattgtgcactctatacctaaaaggactaattatgaaaattctaaaattcatcatctttacatttgcctggattatatatgctgcatttttgtatgccatattctttttatgattattttttatatacataagcttaagaattataaactctttaattttcatcttcccaaaataactattttgtccagttttctaatagctctacattctcatagatattaccttttacatgatttagatttaattcactccacagcaattcagcatgatccactccgttacaaatccaccaagcgccttccatctgcttaactgctcctgtgaatccatctgtttcttccatacgatcatgaaattcttgatagacaatgtccccttcgtaaatttcactgccttttacatcctcaattcccgtgtatcgaagtaactcaacatctttcaaaggagagatatacaccgcataacaaatgccatcaacgatatgtgccaattgcactctttctttagcaaagtctataaatccgacttcatacattttctccataaccttgtcccacgcccgaaacttaatatcttccatctctcattctcctttacgaataattttttttacattacacatactatctacgagtcagctacattctttcaaaacggagctttacccctccggactgtttaggcatttggcaggtgatttggtcaattacctgccattccgattaaaataacgcttttgttaaaaactttttgtccatgtaatcattagcaatgacttttctgttgacgggccacattgattctttatttctggatctaaccatctatccccgagatgatgttcagctacttcctgtgctatctcaataaattcccaatcagatatacccttcaaatattcaagagctttttctttatccatatcaacactccccgtttcttaacaaaattcaaatttgataacattccaggactccctcatttaagaaagtcctggaaatatagtttatttaacttgaaccaatggattagcttctccacttacttgtggtaacttgccatcccatttttcaatttttttaatttctacaatttctggagttaaagacttcttaataatctcatttgcttcagcttttcctctcgcttcctcaatggctttctctgcattgattgtagcttgctttttctcaatctctgctttttcaaggttttgttgagcatctactactccttgaatcgcttttgctgtatttgcatctggtttaggagcttctaacgtaacagaatctactaagaagccagtagtatctaccatttttctaaactccttttctattgccccattaatttccccttgatgttggaatacttcaagaactgaatagttagagaaaacgtttaatgtagctttcttaagtcgagtttgtaaccacccgttctcaatcacatctggggcctgtcctttgaacttgttataaatcttaggaagtttctctgcatcattcatgtaatcctctgatataatcagtcttataaattataagggctggtatataaatgaaattagatagtaataaccattcagtattcttgttatattatcaccttgtgttggtcgtgaaatacagaagaaatgtgtttgatgatgatatgtcagactatgcaaaagatatgtttgttcgactatctgaaaactataacatcacgttagttgaatggaatcatgatgtagaccacgttcatattttgttcaaggcacaccctaatacagaaatgacaaaattcatcaatgcttataaaagtgcaagttctcgacttattaaaagagactttccacaagtgaaaaagaaactttggaaagagatgttttggtcaagaagtttttgcttgctaactactggtggttcgccaatagacgtagtaaaaacatatattgaaaatcaaagtgaaaagtgaggtgaaatgatatgacaaagcagaataaagcatataaattccgtttgtatccaacaaaagaccaagcacatcttatgcgtaaaaccttcggttgtgtacgtttcgtgtataacagaatgttagctgaacggaaagaagcgtatgaaaaacataaagatgataaggatcaactaaagaaacaaaagcttcccactcctgcaaaatacaaagcagaatttgagtggttaaaagaagtggattcattagctttggcaaatgctcaactaaacttgcaaactgcctataaaaatttctttcgtggtcaaaatgacttcccaacattcaaaagcaaaaaagacagaaagtcttatacaacgaatgtagtgaacggaaatattatattgcttaacggtcatatcaaattgccaaaactgaaaatggtacgtatcaaacagcatagagaaataccacaaggccatataatcaagtcatgtacgatttctatgacacctactggtaaatactatgtgtccattttgactgaatacgaaaaagagatcgtacaaaaagaagtagaaacagttgttggattagactttgcgatggaacaattatacgtcagttctgaggatgagagagccaattatcctaagttctatcgtgaaatgttagaccgattagcaaaggctcaacgagtattatcaagacgtacaaaaggttcagggcgttggaataaacaacgtatccgtgtagctaagctgcatgaaaaagtagcaaaccaacgtaagaacttccttcatcataagtctaaagagttagctactcattttgatgttgtagctattgaagatctaaatatgaaaggaatgtcgcaagcacttcattttggaaaaagtgtcgctgacaatgggtggggtatgttcacttcttttttagcttataaactacatgaacaaggcaaacaacttgtgaaaatagacaaatggtttccttccacaaaaacatgtagcagttgtggagatgtgaaaaatatgtcattgtctgagcgagtctattcttgtatatgcggtgtaaatctcgatagagattataacgcagctatcaatatcaaaaatgaagcaatacgcctattggcgttagcatagatagcaataaaataacccttggaacaagggagttagctcggctgtcttaggacgaattcgttagctaccaaaagtaacgactaaccgagaagcccccacttcaaacagtccgttagggactatcaatagtcgttataatgatttaactaggcttattggcaactatacagattatgctgtacgctggtacaatacgggattagaacgtgtatggggaccggattctagagattgggtaaggtataatcaatttagaagagagctaacacttactgtattagatatcgttgctctattctcaaattatgatagtcgaaggtatccaattcgaacagtttcccaattaacaagagaaatttatacgaacccagtattagaaaattttgatggtagttttcgtggaatggctcagagaatagaacagaatattaggcaaccacatcttatggatatccttaatagtataaccatttatactgatgtgcatagaggctttaattattggtcagggcatcaaataacagcttctcctgtagggttttcaggaccagaattcgcattccctttatttgggaatgcggggaatgcagctccacccgtacttgtctcattaactggtttggggatttttagaacattatcttcacctttatatagaagaattatacttggttcaggcccaaataatcaggaactgtttgtccttgatggaacggagttttcttttgcctccctaacgaccaacttgccttccactatatatagacaaaggggtacagtcgattcactagatgtaataccgccacaggataatagtgtaccacctcgtgcgggatttagccatcgattgagtcatgttacaatgctgagccaagcagctggagcagtttacaccttgagagctccaacgttttcttggcagcatcgcagtgctgaatttaataatataattccttcatcacaaattacacaaatacctttaacaaaatctactaatcttggctctggaacttctgtcgttaaaggaccaggatttacaggaggagatattcttcgaagaacttcacctggccagatttcaaccttaagagtaaatattactgcaccattatcacaaagatatcgggtaagaattcgctacgcttctaccacaaatttacaattccatacatcaattgacggaagacctattaatcaggggaatttttcagcaactatgagtagtgggagtaatttacagtccggaagctttaggactgtaggttttactactccgtttaacttttcaaatggatcaagtgtatttacgttaagtgctcatgtcttcaattcaggcaatgaagtttatatagatcgaattgaatttgttccggcagaagtaacctttgaggcagaatatgatttagaaagagcacaaaaggcggtgaatgagctgtttacttcttccaatcaaatcgggttaaaaacagatgtgacggattatcatattgatcaagtatccaatttagttgagtgtttatctgatgaattttgtctggatgaaaaaaaagaattgtccgagaaagtcaaacatgcgaagcgacttagtgatgagcggaatttacttcaagatccaaactttagagggatcaatagacaactagaccgtggctggagaggaagtacggatattaccatccaaggaggcgatgacgtattcaaagagaattacgttacgctattgggtacctttgatgagtgctatccaacgtatttatatcaaaaaatagatgagtcgaaattaaaagcctatacccgttaatccaatgggaaaaatgaagcttgtgaaagtagacataagtgataaaaataaaaaactagcaggggcaaagtttcatatagaagatgcaaaaggaaaagtagttggagagttaataacagatgaaaaaggagaaataatatcaaaggacttaccaataggaaactataccctagtggaaatagaggcacctaaaggttatgaattattaaaagataaaatagctgtaaaaatagaaaaagatacagtagtagaaattaaaatagaaaataagaaattgccagatccgactgggcaatttgaaattgaaaaagttgatgataaggatagtgaattaaagctaaaaggcgctgtatttcaagtgttagataaagaagggaaagaacttagtagattaataacggatgaaaaaggaaaggtaatttccaaccaattagcaattggtaagtatacgattaaagaaataaaagcaccgaacggatacatgttacttagagatccaatagaaatagaaattacagaagcagtaaagaaacaaaaaataacagtgaaaaatgcgaagaataattgggtaattcctaatactggtgggagcggaacaacaattttttacgtaattggtattatgctaatgtttggtgtgctatatttctgtaagaaaaatcgtatattatgaactgattttatagagttagacagattgttgcgttagagagtttttagggcatgagttcggtattgtactggactcatgttactacatttgttgaaggaggaaggataatagtaaacatagaatatattaatgaattaaaatgtttaagaggtgaacatggtggcaataaaacaagacgaaattaaagtagttgtcggagctggagtgtttaataataatccaggctggattcaaacgcaagaagatgaacttaacttactagataaagctacgtgggaagaaagatttgaatacaactctatttcagctattttagctgagcatgtatgggaacaccttacttttgaagaaggtgtaagagcagctgaaatctgttatgaatttttaaaaccatctggtcatattcggtgcggagtccctgatgcattctttcaggatgaggtatatcaaaatatagttcaaatagggggacccggtccgaaagatcatccagcagcaagtcataaaatcgttcataattataaaacattaacgaaaatgtttgaaactgctggattcgaggtagttttacttgaatattgtgatgaaaatggtcagttttattacaacgaatgggatgcaaacgacggtgttattttccgttcgaaaaggtatgattctagaaataaaggcgataaacttggttttccatcgctaattgttgatgcgattaagcgctaatcattcaaccaaaaaaggagttaatcctatgatttcataagtcgcaaatgcggcttttttatttgtacgtaaatctatatttaattttcaatactatataactcgatttagaaaatatttaagtttttctcagcgtcattcactttaaattaacacttcgttgacataaatatttattttatatttatattataaatgctaacttaaatatgtacattaacgcttgaataaatatgtacattttcatcggattgtacagcacttaccactaaatgagaatggttggcatgccggagacgggaatggagcgggtaatcgctcgtctatcggcattgaaatttgtgaaaatcgtgatggtaattttgaaaaagccttaacccatgctgcgggtctcgttaagtttctcatggctcaccttggattaaagattgggaacgtagtttcccatcaacattggagtggaaagaactgtccacgtccgatatttaatcgaccaggtggatttgagggtttcaagaggatgattgaagatagtctaaacgatatggttgtagagaatcataacaaggatgcgggtacacaaggattaggaattgcttacatggaaggtgtaaatattaaccttcgcagaggacctagcacgagtagtgatgtaattcgtaaattgaacaaacctgaatcttatattgtttgggaagaacgtgagggctggctgaacctaggtaattcatgggtgaaatatgactcttcctatatttactttgcccgtagacaaacgagtaatattggtaaattagtggttgtagatacaaacgaattatgggtctatggttctgctaattggaatgataagattaagactgtaaaaaaaggggaagcatttacaattcaagatgaattgcaggtaaatggttctaacatgtataagtgtaagtatttctacattaccacaaattctcaatttgtatatgtaaaataggaaaagtggattttatatataagtataaaaagtaataagactttaaaataagttaacggaatacaaacccttaatgcattggttaaacattgtaaagtctaaagcatggataatgggcgagaagtaagtagattgttaacaccctgggtcaaaaattgatatttagtaaaattagttgcactttgtgcattttttcataagatgagtcatatgttttaaattgtagtaatgaaaaacagtattatatcataatgaattggtatcttaataaaagagatggaggtaacttatggataacaatccgaacatcaatgaatgcattccttataattgtttaagtaaccctgaagtagaagtattaggtggagaaagaatagaaactggttacaccccaatcgatatttccttgtcgctaacgcaatttcttttgagtgaatttgttcccggtgctggatttgtgttaggactagttgatataatatggggaatttttggtccctctcaatgggacgcatttcttgtacaaattgaacagttaattaaccaaagaatagaagaattcgctaggaaccaagccatttctagattagaaggactaagcaatctttatcaaatttacgcagaatcttttagagagtgggaagcagatcctactaatccagcattaagagaagagatgcgtattcaattcaatgacatgaacagtgcccttacaaccgctattcctcttttggcagttcaaaattatcaagttcctcttttatcagtatatgttcaagctgcaaatttacatttatcagttttgagagatgtttcagtgtttggacaaaggtggggatttgatgccgcgactatcaatagtcgttataatgatttaactaggcttattggcaactatacagataacgaaacaaacaacgtgaaacgtcaatttttattttagatgctagacaaactaactttattggagagtttgatcctggctcaggatgaacgctggcggcgtgcctaatacatgcaagtcgagcgaatggattaagagcttgctcttatgaagttagcggcggacgggtgagtaacacgtgggtaacctgcccataagactgggataactccgggaaaccggggctaataccggataacattttgaactgcatggttcgaaattgaaaggcggcttcggctgtcacttatggatggacccgcgtcgcattagctagttggtgaggtaacggctcaccaaggcaacgatgcgtagccgacctgagagggtgatcggccacactgggactgagacacggcccagactcctacgggaggcagcagtagggaatcttccgcaatggacgaaagtctgacggagcaacgccgcgtgagtgatgaaggctttcgggtcgtaaaactctgttgttagggaagaacaagtgctagttgaataagctggcaccttgacggtacctaaccagaaagccacggctaactacgtgccagcagccgcggtaatacgtaggtggcaagcgttatccggaattattgggcgtaaagcgcgcgcaggtggtttcttaagtctgatgtgaaagcccacggctcaaccgtggagggtcattggaaactgggagacttgagtgcagaagaggaaagtggaattccatgtgtagcggtgaaatgcgtagagatatggaggaacaccagtggcgaaggcgactttctggtctgtaactgacactgaggcgcgaaagcgtggggagcaaacaggattagataccctggtagtccacgccgtaaacgatgagtgctaagtgttagagggtttccgccctttagtgctgaagttaacgcattaagcactccgcctggggagtacggccgcaaggctgaaactcaaaggaattgacgggggcccgcacaagcggtggagcatgtggtttaattcgaagcaacgcgaagaaccttaccaggtcttgacatcctctgaaaaccctagagatagggcttctccttcgggagcagagtgacaggtggtgcatggttgtcgtcagctcgtgtcgtgagatgttgggttaagtcccgcaacgagcgcaacccttgatcttagttgccatcattaagttgggcactctaaggtgactgccggtgacaaaccggaggaaggtggggatgacgtcaaatcatcatgccccttatgacctgggctacacacgtgctacaatggacggtacaaagagctgcaagaccgcgaggtggagctaatctcataaaaccgttctcagttcggattgtaggctgcaactcgcctacatgaagctggaatcgctagtaatcgcggatcagcatgccgcggtgaatacgttcccgggccttgtacacaccgcccgtcacaccacgagagtttgtaacacccgaagtcggtggggtaacctttttggagccagccgcctaaggtgggacagatgattggggtgaagtcgtaacaaggtagccgtatcggaaggtgcggctggatcacctcctttctatggagaattgataagtctgtccaaatgcaggcttatctcaccgcaacttgtcaaaacatgaaaaaaaatagccctccatctgaccaaaaaaggtctggtggagggccatttttttgaaactctattattttatattgtttttattcgctaaaatcaaaaacaaactcatcttatgaccgcgtttcttcttacgaaattaagtaattgtttcaatagctggttttttagtcatagaattactttatctctcagctttattattctgttctttcgcctaaaattccaatatccccattacttccttcgtaaatagtttgaaatcagttaaatgtttttcaataatttgacgaacaatatctaaatttacactttgataatcatgaacagcaatattacgaaatccaaccatcgcctttaacttatttgctagatcagcgctaaggaatcctgctgtaaccaataaatcaaaggcctctcgactagattggggtagtcctaattttttcccagcaacaatatgcattgctagatcaatactcgcttcacaagctctttgtatattcaatattattgaatcttgttttgtaaagtcctctaaattttcagggtcatttccatacacatcttggattctttttatacaacgctctattgtagaaattttatttaaaataacctcattcttcatatatagaacctcttttctttatatcatcaaatactacctgtcgttcttcattcaattttgaatacatttttaaagttttcatttcaaaaataaccttacgtttttcatcggaacaaaatattgtctttcctgtatgtataatctgagcttgaaaaactgtagaagcttcggataaatcaactaaatcaacatccctctgaacaatgttagctaactcctgtgctaataaaaaacgttcatagttccctaatgttgtgtcacttacataagctatatcaatatcactatcttctcgttctctgttctcagccgttgatccaaacacaattatccaatagggattcaccgtctcttgtaatttttctataatagctgttatcatgctttgaaaaatcatttaattaatcccccttattgtacttgaattttattatatcataaccaatcataaatcctttaaacgactataaatacgtaaacaaaattaagcttttttagtacttaactcctcacaaaatcagaagcttatttctgacctaaaattattatagttcaggagtagatatattgtagctttggatcttaaataattgttaataatccaacactttcctgttaaatgccttttttattttcttcctgcaaaattaaaagactgacaataactgtcagcctcttactttaacaactctaaagaactttcgcctatttcacaatatacattctaatagtttgaggatatattgctctattgaactacccccactttcacttcgtttagaagtgagggattcctaagtaaagagttctatcgaactctaattgattaggctaaccccgcagtccttgcggttagaagccttatcgcttcatgctttagattgatacttgcgttaatatccctatcatggtgtgtacgacaagaaggaaaagaccaactatgagaagtcaaggggagttttttatataaatagggggtgtttttctaaaaaagggcgtgccaaataaacctaaggattttcaaaaaaaatgaaaaggtcatgtttctgttgtgtgaggtggtacttcataaggcttattgcttttaagaatggcatagataatgtaacacagctttctagctaccgcccctatacaaacatagtagtgctttccttgctttcgtttcttttcataaaaagcttttaatacagggtcatgtttatgcgctgtaatagccgcttggaataaggctctacgcaaatgagaagaaccacgtttggatatagacgtacctgaggcttcaaattgtccagattgggacacagaggcatcaatgcctgcgtaagcgacaagtttagatggtttgtcaaagcggtgaatatccccaatttcacttagtatagtggctcctaaaatgggcccaacaccaggtattgtcatgataggagtatctaaatcaattaaaagttgtgacatttcttcttcacattctttgatttgatcttcgataaaacgaatttgttccatcaacatttttagttggaaggaaaaagcgtctttacagaaggtaacaccaaacgaattagaggctaattccattagcttgttggctgttttcttccccagtcgattacgactggtttgctcaattatttgtgttaaatcatcaatagatatctgttcatagtcactaggagaggcatattcaagtaagatttgcgaagaagttttaccaaaaacatccgaaaagatgctttggtactctgggaaagtctgatctaatacgacaagagcttttcgttttaaatcactcatattacttacaagcgcattacgaaagcggctcatttgttttagagcgaacattttctcgtccacaagtggggtttcaacaaaacggccgaatcgaatgatatcggcaatcatagtggcatcaatggcgtctgtttttcgctttctaatttctgttccttttcgccaagcattggtttgaattggatttaatacaacgactgagaagccatgatcaagtagaaaagaataaacggctaaccaataatgtcctgttgcctccattccaatcagtatttctgtaggagactcaatatattggtacatccaatttaacagtgcttgtccgccttctttatgattctgaaagggaaatggcttagtaataggttttccagtttggtcgataatggacgcataatgtttatgtttagcgatatcaatacctaaatagaacatagcttacacccctattttaatcagtgttagatagtgttgtcctcctctgaactaataagcgctactacctcgtaagagatacgaagaatgaccaatggtcatcaacatccaactcattcgtaaactacttattagacagaggtaccattctttcaaccgaatacaaagattcaaggaggtggtcggcaacactctatctacaaatataagtatctcatataactagatactcacgggtttataggtaaatccctttcctaaaaaacctaactttatcatacgaggcctcgtatgattaagttaggtttttagggacgggatgtacctataaatccaagggtatctatttttatgagatactaatatttgtagatagagtgttgccgaccatctccctgaatctttgtattcgtaaaaaagagcggtacctctgtctaataagtagtttacgaatgagttggatgttgatgaccattggtcattcttcgtatctcttacgaggtagtagcgcttattagttcagaggaggacaacactatctaacactgattaaaataggggtgtaagctatgttctatttaggtattgatatcgctaaacataaacattatgcgtccattatcgatcaaacgggaaaacctattactaagccatttccttttcagaatcacaaagaaggtggacaaacccttttaaatcagatctaccaatacattgagtctcctacagaaatactgattggaatggaagccaccggacattattggttagctgtttattcttttctactggatcatggattttcagtcattgtattaaaccccattcaaaccaatgcctggcgaaaaggaacagaaattagaaagcgaaaaacagacgccattgatgccactatgattgccgatatcattcgattcggccgttttgttgaaaccccacttgtggacgagaaaatgttcgctctaaaacaaatgagccgctttcgtaatgcgcttgtaagtaatatgagtgatttaaaacgaaaagctcttgtcgtattagatcagactttcccagagtaccaaagcatcttttcggatgtttttggtaaaacttcttcgcaaatcttacttgaatatgcctctcctagtgactatgaacagatatctattgatgatttaacacaaataattgagcaaaccagtcgtaaccgactaggaaagaaaacagctaacaagctaatggaattagcctctaattcgtttggtgttaccttttgtaaaaacgctttttccttccaactaaaaatgttgatggagcaaattagttttatcgaagatcaaatcaaagaatgtgaagacgaaatgtcacaacttttaattgatttagatactcctatcatgacagtacctggcgttggaccaattttaggtgccactatactaagtgaaattggggatatacaccgctttgacaaaccatctaaacttgtcgcttatgcaggcattgatgcctctgtgtcccaatctggacaatttgaatcatcaggtatgtctatatctaagcgtggctcttctcatttacgtagagccttattccaagccgctattacagcccataaacatgaccctgtcttgaaagctttttatgagaagaaacgaaaacaaggaaagcactactatgtttgtataggagctgtagctagaaagttgtgttacattatctatgccatcctaaaaaacaataaaccgtatgaaatccctcaatattcaaaagaagtttgatacttttatttttttaacatctcttagggttatttggtgcaccctttttttaatttcctatttataaaattcctcttgacttctcatagttggtcttttttaaaatgtaccctatagaatagacacttgaaaaaagtctattctatagggtatttcttgtataataaaaggaaaattgggatcggagaatgttgaaaatgacaaaaaaactatttacagaaagagaaattcaaattctatcaaataacctatacgtaaaatctgtaagtcagaaaggtatcacttatacagaggaatttaagcatatttttattgaggaaaatgaaaaaggaaagctacctcgaaatatttttgaagaatgtggttttgatatagatatgattggaatgaaacgagttatgtcatcgggaagtagatggcgtgctgcttatagaaaaaatggtgtattgggtttaagggatacacgtatcgaaaacgctggaagaactcttgagagagagcttacgttagaagaaaagtatgcccgtttagaagccgaacgaaacttactaaaggcggaaaacgaattgctaaaaaaaatcaaacttatggaagggaggatgagaaggaaataacactaccacctagtcagaaattcatcttgattcgttctgtcatcatgaaatacaacttaaggaatatggtcagtcatttgtgtaaagtagctggtgtatcccgttcgggatactataattacttttcagtttcatctcaagaacaacggaaacaaaagagtgatcgagatgaaatcttgaaggaaaccatattaaaagcacttcgatttagaaatagaaacaaaggggctcgtcagataaagatgacattggcgggtcagtttcaagttgtctacaatttaaagcgtatccgtagaattatgaagaaatacgagattatctgtccggttcgcaaagcgaatccttataaaagaatgcttaaagctacaaaagaacatcgaatagtaccaaatcaattaaatcgggaatttaaacaaaataccccagggaaaacacttcttacagatatcacctatttagtttacggtaagaatcaaagggcctatttatctacaattttagacggctcaactaatgaaattttagcttaccatgtttcagaacagatgacattagagctcgtaacgacaactctccataaactaaaaaggaatccgcggattcgattgactgaaggtgcttatattcattcagatcaaggatcccactacacaagccctacctatcaaaagctagttaaaaagctaaacctaggacaatccatgtcaagaagaggaaactgttgggataacgccccacaagaatcattttttggtcatctgaaagatgaagctcatataaaaccttgcgtgtcctttaatgaattgaaacaagagattaagaaatatatgacgtattataatcattatagatatcaatggaatttaaaaaagatgactcctgttggatacagaaaccatcttcttgatgttgcctaacttttttcaaaatgtcctttacaaagggtacagattatgtggtgtggtgaatacatcgtcagagtcctccgcaatcataccgtaattaattggtagtgtaatagattcccctgactcgaagcgttcaacatctcttataaagtgatactgtttgatgtttacagagttgattttatctaaagcagagaatggaaggtcttctatgtccgttttaagcgtacgagaagaattagggataaattcttgcgcccacatacgtcctgtagcagatatattttcttgcgctcgtaatgttcttaattccatatctttccatcccttacccatcatatctttaatctgcaggccattgttataaccttgtacaaaacttgaccttatcattgcattacccataattaaatcatgatcggtggcgccgtttacgaaatgtattttatagtcactgccttttcttttgaaagtaaactgccccgcgttatttgtaaaaatatgtggttcagttgtagttacagagaagtaaccatatcctggagcccatccttcagattcaaaaataatattattcaagttttgaaaacgaaattgtccatcagaatatacgctcagatgtccaccgtcattatgcatttgaatatagtttgaccaaatattagttccttctgcattttctcctttagaaatcccaaatttcgcatatgctttagaaggttgatcaactccattaattcgcggcatgacttgataaatataaaatgatcctgtaccagcgtattttctattatcagaaccaaggactaatgaaggttgaatacttccatcatctgtttccataaatcctatatagccacgtggcttatctaaatcgaaaatcttcatgtcttgcttatttatttcaacaaatctgtttccacttgttttaagcgttaccccttctaaaacttttcctttaatatgatttgctgtaatgaaacctactaagttaattctgttcgcattcaacgtaatgttttctttgctcatattaaatgctgcaattacatcgttctcttttacagatagactaacgcccttttcagttaactgaagacgggtttccatatctcttacataagaatcttttgcaaattgtccatttgcttgctctattgtgtatacttctttcttttttgctgcggcattgataccctcttcattgatagtgaaacggttgtcgatcatagtcattttctgattaaattgttccgttgcaagtttattagctagttctcccaacaaatcttgtttatttttatcaactatttgcttcaactcaggtatcttaaacccagcaacataatcttctacttgcttaagttcaactttaccttgcagtgctttcgcagtattttcccatccagctttcgcctcttgtaattgtcttccttgttctgtctgcgtattttgtatgaaagagacattttgtttaatggtagttgcatctttttctacagttgaagtgcaccccaattgttagacacataactaacaattggaggtgcattttttatggctaaattttcttcaaaagataaaatacaagcagtaaaacgatatctagaaggtacggaaggcggaaaaaccattgctaattctataggggttcatcctagagaactttatcaatggattaaacggtttgaattttcaggggaaaaggcgtttgaaaaacgctatacaacttaccctctcgagtataaactagatgtaattcattatatgaatgaaaatgggacatctctgagagaaacagctgctttttttaatattccttcttgcgaaacactccgaaaatggaaagtagcttatgaaacagaaggattagatgccctaaaatcaaagaaaaaggggcgtctaaccatggccaaagaaaaagctaagctccaacatttaaaacaaaacgaagtatttcttgaaggttctatagaagcgctacaagcagagaatgaacgtctgcgtatggaaaatgactatttaaaaaagttgaatgccttagttcaaaagaagaaaacatcacagaccaagacaaagcgcaattgatttatgaattaaggcataaatataaggtcgttgaccttgtgaaagtcgctaatatcgctcgtagtacgtattattactggatgaaacaagcgaaacgtccagataaatataagaaagttaaagaattaattaaagagatttttagtgagaattttgggaggtatggttatcgtcgtattacattggaattacgtaatcgaggccatgcattaaatcataaaaccgttcgacgtttaatgaatatcctgggattaaaatgtcttgttcgattaaaaaaatatcgttcatataaagggactgtcgggaaattcgctcctaatattttaaaacgtaattttcacgcatcaaaaccaaacgagaaatgggtaacagatgtgacggagttccacttacatggtaaaaaactatatctatcacccattttagacttatataacggagaaattatagcttacaatatagaacatagacctgcctattcccttgtttctaaaatgttaaataaggcgtttcaatgtttgaatgataaggaaactcctattttacactcggatcaaggttggcattatcaaatgcgacaatatcatcagtcgcttaaaaaacataacgttatccaaagtatgtcccgtaagggaaattgcttagataatgcagtcatggaaaatttctttggcttattaaagtctgaattactttatcttaaagagtttgaaagtatggaacaatttaagcaagaactagaaacttatattcattactacaatcacaaaagaattaaaacaaaactaaaaggattgtcccctgtgcaatacagagttcaatccttagtagctgcttaatatatttgtctaattttttgggttcagttcaaaaaaacaaacgattctttcaacaagctgtcgaggaagaatcgtttgtttttttatagtgagtatctacattcctacacaatttttgtaggtttaattaggttcaatgccaaatataattaatgtttaattttctagatatctgtatagtgtggatttgctaattcctgtttcatcttttatttgagcaagactataatctccactttgatacataacaatcgcacgttttacattttcatcaggttttcttggtcgtcctggagtgattcctttctgttttgcttcgtataagcctttttttgttttttcacttatcacgtcactttgaaaattaacaagatgatttaaaatcaagctgaattgatatccagcttgattgcttgtgtcgattccctcagtaagagattgaaagtaagcgcctttcatatcaattttttctattaactccaccagatggcgtgttgaatcagccaatgtaaaaagttttgtaacgactattttatcacctgggttcaggttacttatcataattttaagatgtgttcttttttttgctgatgaatgttcctctgaaatgatttttgtgcactttactttttctaagttttttagttgtccctcgcatttcagatcatcttgatatggtctcatatatccgattaacatacatgctctcctaacagttaagatgtttcttttatcataccataacttggcgtcgaaaaatcagtatcaaaaaggttcctttttgggacgataagtgttagactgtttttattaaatcgtgaacgcggcttttatgagacttaaaagccacaaaataaatgatatgaggtgtataaaacagtggtagaaaaattaaaaacagaatggttttctaatgttagagcagatatcctcgcggggattgtagttgcactagcattaattccagaggcaattgcattttccattattgcgggtgtagatccaatggtaggattatatgcatctttttgtattgcagttattattgcctttgtaggtggtcgtcctggaatgatttcagcggcaacaggtgcgatggcattgcttatggttcctttagttaaagaacatgggctgaattatttattagcagccacaattttgactggtgttatacaaattatttttgggatatttaaagtagcaagattaatgaaatttattccacgtgctgtcatgattggttttgttaatgcgttagcaattttaatttttatggctcaagtaccacattttattggtatttccaatctgacatatgtatttgttgcgattacattagctattgtctatattgtaccgcgatttatcaaatccattccagctccgttaatagcgattgtattattaacagctgttacaatttttatgcacctagacttacgaacagtcggtgacttaggagcgattacaagaacaaaaaggtacaagagaatattaaaaacaatactgttgaaattatagaagctaagaatccaccaacaacagggcttaaacctaataaaacgctatggcgtgatatgagtaacggaaagcccggcattttaaaaatatggacaggtacagtttgggaatcggttgtgccagatgttgaatccgttaaaaaagaaacacttgagcaggttaataaaaatattgagtccacaaaagcagaattaaaccaaaaggtacaagaagcacagaatcaagctacaggacaattcaatgaagtacaggaaggtttacaaggtgtcagtcgtacaatttctaatatcgaaaataaacaaggtgaaattgataaaaaagtaactaagtttgaacaggattctaatgggtttaaaacatctattgaatcgttaacaaaaaaagataatgatatcagcaataaattaaatacggtcgaacaaactgtagaaggtacaaagaagactatttctgaagtggagcaaacaactaatgatctaaagaagaccacaactgaagttaaagaacaagcaggaaagattagtgaaaagttaacaactgtagaaacaaaggttaatagcgataaagccggtggacgtaatctgttattagattcaaatgctaaatacgaaaaaacggattatttaatcaatgtattttcgctaactgaaaattttgttgcaggtgaagaatatacttttgtaattaaagggagtgtacctgcaagtcaaaagtttggtatttggatgaatggtgggtctagtaatgttggatatgcaacaagtgtttatgcgaatggagttacctatgtaacttttaaagctgtagcagtaacgagtggaaatgaaaggaagttgagcctatataactttccaagtaacactacaaaagccattgtagaatgggtagctttatataaaggtaataagccacaggattggacaccagctccagaaaatcaagtaacgaatgatgaattcactaaaaaaacaaccgagattgaaaaaagtgtggatggtgtaacaaatactgtatctaaggtgaagaatagtcaagatggattcgaaaagcgcatgactacagtggagcaaacagcaactggattatcttccacagtgggcaatttaaataatgtagtatcagatcaagggaaaaagcttactgatgcaaatacaaaaattgaacaacaggcaacagcaatcggtgcaaaagttgagcttaaacaagtagagaattatgttgctggatttaagatacctgagttgaagcaaacagtcgataaaaataaacaagatttgctgggcgaactagctaataaacttgcaacggaacaatttaatcagaaaatgactatggtcgacaaccgtttcactataaatgaagagggtatcaatgccgcagcaaaaaagaatgaagtgcaccccaattgttagacacagtctaacaattggaggtgcattttttatggctaaattttcttcaaaagaaaaaatccaagcggtgaaacgatatttagatggtacagaaagtggaaaaacaattgctaaatctataggagttaaccctagcgtacttcgtgagtggattagacgatatgagtcttcaggtgaaaaggcctttgaaaagtgctatacattctacccagcccagtataaactagatgtactttattatatgaatgaacacgggacatctatcagagaaacagcggcacttttcaatataccgtcttatgaaacacttcggaaatggaaaatagcttatgaaacaggaggattggatgccctacaatcaaagaaaaaggggcgtccaaccatgaaagataaaaaaataaagccagtagatgaaggatcaatcgaagccttacaagcggaaaatgagcgtttacgtatggaaaatgcatatttaaaaaagttgaatgccttagttcaaaacaaagaaaaatcaccaaacaagacaaagcgcaagtaatctacgagttaaggcatgaatttcctatcaaggagttacttcaactcgcaaacattccacgtagtacgtactattactggatgaaacgttttaatcgtcctgatccaaatgcggaggtaaaagaactgattcaagctatttataatgaacacgatgggtgttatggttatcgtcgtattcgtgatgaacttatgaatcgtggacacaaagtaaatcataaaaaagtgtatcgccttatgaaagaattagggttaaaatgtctggttcgtatgaaaaaataccgctcttacaaagggacagttgggaaaattgcgccaaatattttaaatcgcaacttccaagctgaaaaaccaaatgaaaagtgggttacagatattacggagtttaagttatttggggagaagttatacctatcaccaatgttggatttatttaatggtgaaattatcacgtatacaattggttcaagaccgacctattcccttgtttcaacgatgttggaccaagccctttattgtgtaaccaatccggataaactcctcattcactctgatcaaggttggcactatcaaatgaaacaataccgtcattctcttaagaattgtggcataactcaaagtatgtctcgcaaaggaaactgttatgacaatgccgttattgaaaatttcttcggtatcatgaaatcggaatttctgtatcgaaaagaatttgaaagtataacacatttcaaacaagaattagcaaagtatatagaatactataatcataaaagaattaaggcaaaattaaagggtatgagcccagtacaataccgggctcataccctagaggctgcctaatgaaacgacctgtctaactttcgggggtcacttcacgtttttcatcttcatctattccagatgcttgattttttaaaatcgattgcaagatatctttatgacctccaaatgctcggacatcttctccaatactatctcttaacttagctagttcttgaattaaattctgtgtatatgcttggttttgtttaatctcaccttgtaaatctgtaatgccttcttttaatgtatctgcatctccttcattaattgcttctactaatgtatcgtaataattgtcaaatgtggtatcatactctacaattcctgtaagggtatctaaaagttgtttttttatgtgagcatcccattttgtagcatgctctcttgcattcttttgatcttgtgcaatttgactaggtagatttgtatatcctttaatatcaattccttcaaagttaacatctggattattaattaacaaataagagtaatcattcatggattttgcaaataccccagcatcttgcaaagcttttttcatcttttcactgtttacagaaagagatatatcttccgtactggtttgttctattttactttcacttgcaaaagcagctactggtgaaactacagtagttgttgtcagggttaaaaacgtcgatacagcaagtagtttataaggaaaattattattcactttaattcctcctatgaatatatattaatttttagtttgttttttcttgtttaaaagcaatgtcttttgaaatgaattctgcgtccttatgaatgtcattccaactttgtttagcagcttttaaatcgtcaggtattaacgaaagtttatgttcttgcatttgatcgatattatcatataaatctttataattagcccccattttattccattgttgctgaatacttgttagagacattattgcttgatccactgtctgatacaaatatgttagagtgtctttcgtattagtaagtgaaataaccgcttgattagccagatcagctttcatacttaattctccgattttattcgaaatttcattataagaattcatatgattagatgcctcgacaccagctgctgttcctaaaccgataccagctgctcctagagctgtaagaccgccaacaacagctggtgtagctgtaccaccagtcacaacaattactaccgctcctgcaatcgttccaataactaaaatagctgctcctagtccaccgccaattgaccaggctaatacattatcaaaatgtgatttctgtgtagaacgtaaattctcaatttcggcctgaagttgtgggactagtgcttgttttcccgctaatatagccgtcaatcctccctgtccatctggaccaccaacattatttttaaaatctacagtatttgtatacaactttgttttgaaagcctctaacatcttaatgacgattttgtacatgcttaaacaagcgaaaatgtacatgtttatcttgacatttacacacagatcactgttaccaaaatatttactacaaatttttaaaaaaatgtactgcacaattgtattgaatgatatttttcagtccacgacagtaactctggcgctccatctacaaaaacatcctattttttcttattcccccttttcgaggggatgggcaaaaacacccattttcaatatatttctttactacgtctattggcgaaccaccagtagtgaataagcaaaaacttcttgaccaaaacatttctttccaaagttttgttttcacttgcggaaagtctctcttgattagtcgagaacttgcacttttataagcattaataaattttgtcatttctgtattcggatgtgccttgaacaaaatatgagcatggtcaacattatgattccactctaccaatgttatgttgtaattctcggataacctgacaaacatgtcttttgcataatctgatatatcatcattgaatacatttcttctgtattttacaaccaatacaagacgataatacaacaagaacactgaataattaatattatctaatttcattaatataccagtccttattatttataagactgattttatcaggggaaatatcaaaagcaaagcccttttgctccgtcaaactgaaattcatctcctacctatcgttgggctacgcttgaggaaggagtattctttcgtgggatacgttaaaaatcacaacactattgtctacaaagattttgttttcatcaatttatcattttagccaagaagactccttcctcaaggagcgtgaagggtcacagcccagtgagtaggtgggagatgaattggcgtcgaacaagggatggaaggaagccatcttaattgttcgacatacagaaagtgttgctccactatctatcgaatgtacgttcggtgtgtaatagtcatataccaaaatggaggtgaattaaataatgattaataaagcctataagtttcgtatctatccaaatcaagcacaagcaattctaatcaacaaaacgattgggtgttctcgctttgtattcaatcatttcctatccttatgggatcaagcatacaaagagacaggaaaaggcttgacctatggtacatgctctgccaaactacctgccatgaagaaagagcttgtttggctaaaagaagtggatagtattgcgattcagtcgtctgttcgcaaccttgcggatgcttatacacgctttttcaaaaaacaaaacagcgcaccgcgctttaaatctaagaagaacaacgtacaatcttataccacaaaacaaacaaatgaatcttttaaattcacatacccttcaagagcttttttcgtaccttcacttacaccatcaccaaagcgcctactgtcctcttctgctttttgtgcctttttcccagcatctacgaaagcaaaacctaatgcaccaagtccaattacaactccaccaattgttgcgacaattggatttgctataattgcaccaataccaaaagaaaggaacccaagtgcactaactacccccataactgccggggctagtaataatgctgtcccatatacttttttagagctatcatctaatccgttgaaccaatcagcgacacccttcacagattctttcaattcaggaatcgcttgtttagcgatatctaaaatcaccttaccaagtggttctagagcaatttgtagttctcttgttacagatttccattgcttagcgcttgtatcgtaaccatcgaccattttgttcattgcgccactgtagtttccaagacctgtttccatattatttagtgataacatagtagtagcttcaaggtcttcccatttcacgccgaaaagtgcaacgcctaactgattcactttaatttgatcatccgttgttcgtaattcatttaaaacagcattaaaaacatctttggaagtcgcttttccttctagcatcgctttccaaactttttgcgtttctttactcatttgacccattgcttctgttgtggacttactaccatcttttacacggataccaaattcttttacaacgtcattcacataatccaagttatatgcgccatttttcgaaccattaatgagaattgtgaacattccatctgcactaaaccccatttcatggaacaaaggaccatactcacttaaattatcaaatagctcatttgagtagtttaaaccctttacagaaccttgtgctaataaatcaaatgcttgttggccagataaaccaaagcgtcccattaattgggctgcaccacgagttacctcgtttacatctgattccattgtttctgctaagatttcactatcacgagttacttgttttaaagtatcatcatcattaatatccttaatattgcgctttactttaactaaagaatcactgacactagctaaatcttccccatagccttcgcgccatacttctttggctacagcactaacctttaaactttcttcccttgttaatcctaaaccagattgtaccttcttgttcgcttcttcaaattgacttgcatttacgtgcgcccataagggggcaaggaaaaacggtgattgcaagctgttaggtcaaccctaaaagacctagtatcacttggctaaccttggagggaaactgaaaggggacaacagcatgccaagaaagccgtaagttggctaaacatcaagtcaagactgagcggcaagatataaagtatagataaggatgaaagctaaactgcttgaatgatagcacaagggaggccaccgtaactagtctcgaaagatgtttataaacgagattcaacagatatcataaagatagtgtgagtcatcttatatgaatagggttatctgttgcccacttctatatggaagaaaagtgtgaacgtcacatccgacactatacgtgcaaattccttgtttactaaatggggattgtctaagttagaatgcctgcgaggctattgaggataacttcaagatgtaacagtcaagaagtatggctcatgaatatctaatatgacaacggagccttcgtagtagtcagagctagggaaagcctagtacagggcgaaggaaggcagtctgttagcttattaccaaattggggaggtgcgaaaggcactatgcaatgtccaaaaatagtactaagcaatctgcgaacgaagagtcttaataaggaatatcaatatacaagactttatcgtaatttatataacccagatttctttttattagcatacgataatctaagtaaaaatgatggcgcattaacgataggagtagaccaaaggtctattgatggtttttctatgaaggaagtggaagacttgataagtgttttaaaaagtaaaagctatcaaccatatccatctagaagaacctatattgaaaagaaaaatggcaagaaaaggccattaggaattcctagcttttatgataaattagtccaagaagttatacgtatgatactagaagcaatatacgattcaagcttttctagttcatcacatggataccgaaaaggaaagggatgccatagtgcgttattagagataaagcgcacatttacaggtagtaaatggtttatcgaaggagatattaaaggatttttcgacaatattgaacatcatactctagttacaattcttaaaagaagaataaaggatgaggcgtttatagagttgatctggaaattcttacgagctggatatttagaagaatggaaatttcataatacctatagtggagcgcctcaaggtggaatcattagtccaataagtaaaaaaagagtccatctgatatgatggactcaatactgttttatctggaggggatttttttatggcaagaaaaggacaatcatttcaaaaatatacagaagaactaaagcgagaagcagttcgtcttcgattagaagagagaaaatcattgcgagaaattcgtgaacaactcggtgtgaagagcgatgcccagattattgagtgggtaaaacgtgcgcaacaaggggagtcctttgatgatcaacgtggtgtctggaatcgaaagaattttaatagtctagaagaagaaaatgcttatttgaaggcacaggttgagtatttaaaaaagcgcaatccaaatctacacgggaaggaatggtcctaaagaaagaacgattttctcttatcgattcattacgccaagcctatccactccgatggttgcttcaaatcgcggaagtttctaaggctggctactataaatggcggaaatatcataacgtgcagcgtttacgtcagaaaagggatatgtggcataaagaacatattttatctattcatcgtcagcacccttactatgggtataaacgtatgactcgtgctttggctcgagaaggaatggtaatgaatcataaacgtgttcgtcgtcttatgagagagctgggtattcaatctatcattcgaaaaaaacgtccgttttatggaagaaaaacatctgtggtatttaaaaatcatttgaatcgagagtttcaagctgaaaagcaaaatcaaaaattcgtaacagatattacttatgtacgaatcggagaacaatttgcctatttgtcggctgtgttagatttatacaacaatgaaattgttgcctggaagctatcttcaagaaatgatttagatttggttttaactacattacgtcaattagaagggaagtcattaactactaagccccttttccattcagatcaagggtttcaatatacatctaaatcctacgcaaaacagttagagaaattaggatttgtcggtagtcattctagacgtggaaactgttttgataatgcgtgtatcgaatcattcttctcacatttaaaaacagagaagttgtatttagtgtgcccaaaaacatatgaaatggcctaccgagcaattcaagaatatattcaattttataatacagaaagattccaagaaaaacttcacggcctttccccgatagaatatcgggaaaaggccgtggcataatactctttttattatgtggaatcaattaaaaaagatacactggagcaggttaataaggatattaaactcacaaaagaagaattaaataagaaagtggaagaagcgcaaagtgaaaccaatggacaattcaaggaagttaaaaatggtctccaagaagtttcgcaaactattaaaaatgtacaaaactctcaaggtgaaattaataaaactgtttctgaaatgaaacagactaacgagagttttactagatctattgagttattaacaaaaaaagacgatgaaattactgaaaaattaaatacagtggaagatacagttgaaggtacaaaacaaactattgccgatgtgaagcaaacaacaaacgttttaacaaaaacaacaaatgaaataaagaatacggcgacttcaaataagcagaccattgaacaattacaaaccgacatgagtaacatttctgtaggttcaattaatctagcaagcgattcagaaacagggttaaacaaacagaatatgaccggaacatggtcagacagtaagcaaatgactctttccaataagattaattacagaaacaaaacgtttactatttccttcttatttactgggaaaatgacgaaactcaatgcaaatccttggtttggtgtggaaacggcaataacttatacagacggagagcaagaatggaaatctgtacgtgcagactcacaattaaagattaatgtagattataaggacgcacctctaactgttacgttcaaaacaaaagataaagatgtaactcaaattaggttttattattctggacgcaatattgatggtaatttaaactcacatcatgcgaaattggaagaggggaacataagaactacatggcaacctgctaatgatgaagttacttctaaagaaacgttcacgaaaaaaacaactgagattgagcaaaatgtgaagggaattaaagaaaccataacaaatgtagaaaataatcagagtggatttgataaacgtgtaacagcagtagagaaaaccgcggatagtatttcacaaagcgtcggtaaagtgcaagaaatacaaactcagcaagggaaaacgctcagtgaggctactacaacaataggtcaacattctgaagcattgaaattaactatgaaaaagaaagatgttgaggattatgtaggcggtttaggtactgtcaacgagttgcgtgatgctgattttaagttaggacagaaatattggttttggaatatattacccatttctgaccgcatagtgtttatgattgcaatcgctacatcttggactttgtacttaccagatttaattccatcaacaaattcttctactgcaacccaaccttgctctcctaaatcaatcgttttacttccatcttcaaatgtttttgcgatgtcatttgcaacttcaatagatttttcacgagttgactggaaaagattatcataaacaatattagaatttgcaattaatgactctccatatgtttttacttcatcagcacttttctttctcagatcagcttcttttgaagctctatcttgaagtcgcttgaatagattctcatttgtgctttcaattatttcggaattcttaacgtactctccgaatcctcgaccctgaattttaattttttcagtttcagccttcgtaatacctgttgttaaatccatctcaacacctttggattctaacactttttgcgcttgttgaagttgttgctcatacccttttgttatcaatacagattgctcagagtattttttgttaatttgagctatcgcaatttcttgccctttagtatcagctattttgcttttcgcaaactctatttctttttgtcttgctttatctaattcatttgttaatttcgtatactctgaacctagctcttttactttaccttgaattgtctcaacagaagtatttttgttgaaattatccattgctttacctattttttgaatctcatccacactttttgaagctgcttttccaacctctgcatcaatagcttttaaagctgtaagaaataccgacttatcggccgcagtcatcttatatatttgtccattatattgtgtaagtaagctctgaattttctcatttgccttaataactgcttcttcttgtgccttaaatacttccatttgatcgttaacaattttatcttttgcccttaatactgcggaatcagtttctccagcaaaccaactatctaaatgagcttgtaacttgcctctatctttattaatcgcttggattgcctcgtctgctaacttaccaaattcgtcatgtgctcgttgtacagcctctttagccttatcacctgtcattgttggtatttcatctaatgttttaaaagcctgttcttttaaattcacatacccttcaagagcttttttcgtaccttcacttacaccattattacccatttctgaccgcatagtgtttatgattgcaatcgctacatcttggaccttgtacttaccagatttaattccatcaacgaactcttctactgcaacccaaccttgctctcctaaatcaattgttttacttccatcttcaaatgtctttgcaatgtcatttgcaacttcaatagatttttcacgagttgactggaaaaggttatcataaacaatattagaatttgaaattaatgactctccatatgtttttacttcatcagcacttttctttctcagatcagcttcttttgaagatctatcttgaagtctcttgaatagattctcatttgtactttcaattatttcggaattcttaacatactctccgaatcctcgaccttgaattttaattttctcattttcagccttcgtgatacccgttgttaaatccatctcaacgcctttggattttaacacttcttgagcttgttgaagctgttgtctatacccttctgttataaggacggactgttcagagtattttttattgatttgagcaattgttgccttttggttttcagaatctgtaatatgactctttgcgaattctatttctttttttcttgctttatctaagtcatttgtaagtttcgtatactctgaacctaactcctttactttaccttggattgtatcaacagaagtgttcttattgaaattatccatcgccttaccaatcttttgtatctcatttacactcttagctgctgacttccctacctcggcgtcaattgattgtaaagcggttaaaaacacctttttatctgattctgtcatcttatagatttgcccattatattgcgttaaaagactttgtattttttcattcgctttaataacggcttcctcttgtgctttatacacttccatttgatcattcaaaattttgtcctttgcacgtaggactgctgaatcagattctccggcaaaccaactttctaaatgcgcttggaatttccctttatctttatttattgcttgaatcgcttcatctgctaacttaccaaattcgtcatgtgctcgttgtacagcctctttagccttttcacctgtcattgttggtatttcatctaatgttttaaaagcctgctcttttaaattcacatacccttcaagagcttttttcgtaccttcacttacaccattgtaaatgtcaagataaacatgtacattttcgcttgtttaagcatgtacaaaatcaatcattttctttgctaaaatgatctttaattcgataggattgtcctacaatactgaccaccgtggcatgatgtaagacacgatctagtatggcattggcgagtttagggtcctggaatacttcgtcccaagacttgaagttgatattggtcgttaggatggtactacgcttttcataacgcatatcgattaattgaaagaataattttgcatcctccggatcaataggcaagtacccaatttcatcaataataagtaatttgtattttgtatagtgctttaaacgagattctaggcgattctcaatcttggcacgttttaaattttgaagtaaatcatgacatttaataaaataagtacttgttcgctttttagctgctgctataccaatagacgtggccaaatgggtcttaccaacaccactaggtcctaaaaatactatgttttcttgttgctctaagaaacgtagagaaataaaatctaagatttgttgtttattaatactcggctggaattcgaaatcaaactcatcaacctcctttctatgaggaaatgcgcccattttcaccatagaatgaatcatattttgttctcgtacatcaatctcatagtttgtcagtttaacaagtgtctctacgaaggataattcattattaatgctaaaatcgactacgtcacctaaatgttgtgccatttgttttaattttaaatactctaggtttgttgttaattgttgatagctattcttcatttctatatacctcaccaattactgataaattttgtttcgccaaattgtcaatgttcggatatttaggtagtgacttagccaatgcttttttataatgttcttctttataattgagcttagattggctgattttatgttgtacaattaacttcatgttatgataaacatatatttgattatcatatacttgtaaaccgacggttttaccttgatattcagctggaactgagtattgattcgatttgtaagatatcatgcctgatgtattaacttttacaagtttatgcttaatcatataggaatctcttatcgcgctcttcgggagtggttgtaggagattcttttcctgttttagggcaaacactcatatgtgtagagtaaacatccagcgccttattacattcctgtgataggtttccaaatgttcctccccgaaccggacttacatctctcaatgtatccggctctccatctgtcttctgcattttatatctcgcccttgtgtcttttcatatgacactctttacagagtgcgatagtctttcgatttctcgctatcatttgttgttcaagatatgatttatttgactttgctcgtagattctttaatctcttaatgtgatgcatatgtatcacaacattgctagttccgcatagttcacatgtttccgccttgattctatctgacaatttagtcgtactcattacatgccgagtatttggtaaaatgtctgttccttctagtgataaatttcttgtcattggaaactttctttcaatgaaatgaactttattcattcctttctttgtctcatactgtacagtaaattgtccgtacttttcgtatttctctcgaatttgtttcgtacgtgttctgtattttgacgcaaaagttttcaacattgaataatacatgaaatatgcaaagcggtgcatgtgattgctcacattttcagctagtcgatagtaattgtataaccctcgaatttcgctattatattgcgtgataatctctaaatcttcattgtgttggaaatatcctcttggctgaggtttccaagtgccatcggcacacattttaatggcctgatacttttgaagtttctttatccatgcctcatgtggcattttcaattgaattttaccgttaagaaccctagaagctctcccaagactgttaatgcgtgttgcttcacttttaaacactttaatttcaaatcctagaaatttagcgtgtttcttgaaggcatttgttatcagagtcttttccatagataattctagttttatctcttctttcaaaaatgaagctatctcatttttaataagaattgcatcctctttagaacctattactccaataagaaagtcatccgcatatcttacatatttgagccttctataattttcatccattggattattataaggtgtttgtaacaacttccctttcaaaactttttgttgttcttttagttccgtaattcgtgttacttctccatttagataggcagtatcgattttctcttgaatcttaaagagattaaaaagcaccaaaaataggcgttttggcgaaaaggtgagcggttgaaataaaaatgcatttttccgcttgtcattcctcggcggctccctataatgcgcctccatcgacacggcggatgtgaatcacttcacaaacaacccggtcggttgaagagaaaaaatcctgaaaatcagggttgactctgaaagaggaaagcgtaatatacgccacctcgcgacagagcgctgaagcgcgtcgcaactgctctttaacaatttatcagacaatctgtgtgggcactcaaagtgacatggattcttaacgtcctcggacgaaaaatgaataccaagtctcaacgagtgaacacgtaattcattacgaagtttaattcattgagcatcaaacttttaaattgaagagtttgatcatggctcagattgaacgctggcggcaggcctaacacatgcaagtcgaacggtaacaggaagcagcttgctgcttcgctgacgagtggcggacgggtgagtaatgtctgggaaactgcctgatggagggggataactactggaaacggtagctaataccgcataacgtcgcaagaccaaagagggggaccttcgggcctcttgccatcggatgtgcccagatgggattagctagtaggtggggtaacggctcacctaggcgacgatccctagctggtctgagaggatgaccagccacactggaactgagacacggtccagactcctacgggaggcagcagtggggaatattgcacaatgggcgcaagcctgatgcagccatgccgcgtgtatgaagaaggccttcgggttgtaaagtactttcagcggggaggaaggtgttgaggttaataacctcagcaattgacgttacccgcagaagaagcaccggctaactccgtgccagcagccgcggtaatacggagggtgcaagcgttaatcggaattactgggcgtaaagcgcacgcaggcggtctgtcaagtcggatgtgaaatccccgggctcaacctgggaactgcattcgaaactggcaggctagagtcttgtagaggggggtagaattccaggtgtagcggtgaaatgcgtagagatctggaggaataccggtggcgaaggcggccccctggacaaagactgacgctcaggtgctattttgtatgaaagagacattttgtttaatggtagttgcatctttttctacagtcgcaacacgtttatcaaacccattttgattattttccacttttgtaattgtttctttaattccatccacactttttgtaatttcagttgttttctgggtgaactcatccgttgttacctgctcttcaggcggtgctgtccaatcctgcggcttattccctttatacaaggcaacccattccacaatagatttcgtagtactactcggataattatataagcttaactttcgttcatttccacttgtagccgcaacagctttgaaggttacatacgttattccattcgcgtaaacacttgttgcatatccaacattgctagacccaccattctgccaaatcccaaatttctgaccttgcgggacactccctttcattacaaaggtatattcctcacctgtagagaaattttcagtagaattgtattgattgattaaataatcggtcttctcatatttaacatttgattttaataaaagattacgtccaccagatttatcgttattaactttcttttctacgctctgcaacttctcactgattttcccagcttcttctttcatttcagttgttttttgcttaagctcacttgttgtttgctgcacatccgaaatagtcttctttgtaccttctacagtttgttcgactgtatgtaatgtattgctgatatcattatcttttttcgttaacgattcaatagaagttttaaatccattggaatcctgttcaaactgagttactttcttattgatttcaccttgtttattttcgatattagtaattgtacggctgacaccttgtaaaccttcctgcacttcgttgaattgtcctgtagcttgattctgtgcttctttaaccttttgatttaactccgttttcgtagcctcaatatctttattcacctgattcagtgtttctttcttaactgattccacatcaggaacaactgattcccaagctgtacctgtccatatttttaaaataccgggctttccgttactcatatcacgccaaagcgttttattaggtttaagccctgttgttggtgggttcttagcttctataatttcaacagtattgtttttaatattctcttgtaccttttctgggttgtttccctcttcacgacggacgttagcacccgccgtgtgtctcccgtgataacattcttcggtattcgtagtttgcatcgggttggtaagccgggatggccccctagccgaaacagtgctctacccccgaagatgagttcacgaggcgctacctaaatagctttcggggagaaccagctatctcccggtttgattggcctttcacccccagccacaggtcatccgctaatttttcaacattagtcggttcggtcctccagttagtgttacccaaccttcaacctgcccatggctagatcaccgggtttcgggtctataccctgcaacttaacgcccagttaagactcggtttcccttcggctcccctatacggttaaccttgctacagaatataagtcgctgacccattatacaaaaggtacgcagtcaccccataaagaggctcccactgcttgtacgtacacggtttcaggttctttttcactcccctcgccggggttcttttcgcctttccctcacggtactggttcactatcggtcagtcaggagtatttagccttggaggatggtccccccatattcagacaggataccacgtgtcccgccctactcttcgagttcacagcatgtgcattttcgtgtacgggactatcaccctgtaccgtcggactttccagaccgttccactaacacacaagctgattcagactccgggctgctccccgttcgctcgccgctactgggggaatctcggttgatttcttttcctcggggtacttagatgtttcagttcccccggttcgcctcgttaacctatgtattcagttaacgatagtgcaacggattgcactgggtttccccattcggacatcgacgggtcaaaggttcatatcacctcgccgttgcttttcgcagattagcacgtccttcatcgcctctgactgccagggcatccaccgtgtacgcttagtcgcttaacctcacaacccgaagatgtttcacttcatggttgcgaaaatttgagagactcgaacacacatgagctgtgtgtcgtttcaattttcagcttgatccagatttttaaagagcaaaacttcgcagtgcaccttttcaggttcactctgaagttttcttgtgttccatgcccatcaacttaagaatttgcactacccccaagtgtcaaaaaacgttattctttctaaaaagctagctagaaaggatgacattttttatgaatctttcaattcaagatgaattacaactattttctgaagagctgtatcgtcatttaaccccttctcttttggaagaactcgctaaagaattaggttttgtaaaaagaaaacgaaagttttcaggaaatgaattagctaccatatgtatctgggtcagtcaacgtacagcgagtgattctctcgttcgactatgcagtcaattacacgccgccacaggcactcttatgagtccagaaggactcaataaacgctttgataaaaaagcggttgaatttttgaaatatattttttctgcattatggaaaagtaaactttgtaaaacatcagccatttcaagtgcagcactcacgtattttcaacgaatccgtattttagatgcgacgattttccaagtaccgaaacatttagcacatgtatatcctgggtcaggtggttgtgcacaaactgcaggtatcaagattcaattagaatatgacttacacagcggacagtttttaaacttccaggtaggtcctggaaaaaataatgataaaacatttggaacagattgcttagataccttacggccgggtgatctgtgtattcgtgatttaggatatttttcattggaagacttagatcaaatggatcaacgtggcgtgtgctatatatcaagacttaagttaaaccataccgtctatacgaaaaatccatttccagaatactttcgaaatgggacaatcaaaaaacagtcacagtatatccaagttgatttagagaacattatgcacacgttaaaaccaggacaaacgtatgaaataaaagagtcgtatattggcaagaatcaaagattatttacaagagtaattatctaccgattaacagaggaacaaatactggaacgtagaaaaaaacaaagctataccgaaagtaaaaaggggattacattttcagaaaagagtaaacgattaacgggtatcaacatatatgttacgaatacgccttgggaagtggttccgatggaacaaatccatgatttttactccctccgctggcagatcgtctaatggtaccgagaacggttggcaaccaaatagatttataacacgtgctgaagctgctcaacttactgcaaaaacagatatgttacaacaaaatttaaacgatgaaaaagaggttattactgctacctcatatgaagatttaaatttaacagtggcttcgaaaattacagctcaagagattgatagttttattgcgaaatatcactcggatagtcctttagttggacatgggcaagattttatcaatgcgcaaaatcaatatggcgtgagtgctcattatttagcagcgcatgcgattttagaatctggatacggaaaatcagaaatcgcatatcaaaaacataatctattcggtctacgtgcatatgatggagatccgtttaaatatgcaaaatatttaccaagctacggcgatagcattgcttataacgctaattatgtacgagaaagatatttagaagaaagtggtatgtattataacggcccaacattaactggcatgaatgtgaaatatgcatcagataaaggctgggctaagaaaattgcgggtattatggaacgtattaaaccttttcatgtagaagactatacatatgcaaaaaaattaccaaagaatcctgaaacattagatgtcgacgcgttatcgaatgaaattccatataaaatgtatgcagacggttcaagctcaaatgttgtatcatcagctgcttactaccaggtaccttatccatttaatttaaaaattaaaagtagaccagatgtagctgtcgaggagaataaagttggtacagtaactcctggaacaaccatctttatttatcgtgaagatccgaatggatgggtagaattctcttttgaagctaatggagaaaaatattggacattaaaaaataaattaagtatgtaattaaaaagatctatttcattagttttaatcgtttagattttaatctcatataattgggagacaagttttttactttcttaaaataaagttatgtatacaagaaaagttagagaattattttctctaacttttcttcgctagtatttgaaattaaaaagatggggttcgttaatatccccatgccgctctaagggcggcatttatttttctcggctacaatacgagggaatgcagtatgatttcgcgttggcaatggattctgaggcaaatatttaaaaaactatggttcagggcagcgttattcgcaattgtagcaataataactgctctattatctattctttttaaatcaatgatccctgagtcggtatcagttaaggttggcgcagaagcagtggataacattctaaacatactggcatcgagtatgttagctgttaccaccttttcgctgagcatcatggtcacagcatatggttcagctaccactaatgtaacgccaagagcaacacgtttagtggttgaagacgtaaccacacaaaatgtattggccaccttcatcggttcatttctcttcagcctggtaggaatcattgcccttaatatgggagcctacggagaaaggggcagagtcattttattcgttgtcacactggtggtcattgccttaatcctcatcacattgcttcgttggatatagcatttgacctctctgggaagggttggcgagacgacagcaaaggtggaacaggcagcaaccgaaacatttattcaaagagcaaaaagtccatatttagacggatatccatggcttgagaacaatgaacagccaaacggaacggttgccgtttatccggagatgattggctatgttgaatatattgatatgctgaaactcagcaggctgctgactgaggatcatcgacatgtatatcttgtggcacagccaggcagcttcatacatccttcgatgccagttttgtatctgagtcaggggcaggggccattaatcagtaaagatttgctagatacaatcattgtgtcggatgtacgttcattttctcaggatccccgattttgtcttagcgttatggctgaaatagcctgcagggctctttcaccagcagtgaacgatcctggcaccgcaattgatgtcattggcagaggtgtgcgaatactatccgcttatgcgcagaataaatctgatgaaattagagtgacatatccgggtgtttttgcccatcccctcgaaaagggggaataagaaaaaataggatgtttttgtagatggagcgccagagttactgtcgtggactgaaaaatatcattcaatacaattgtgcagtacatttttttaaaaatttgtagtaaatattttggtaacagtgatctgtgtgacaatagaaccgaatcatgaaataaagcgttagcggagattaacgagcaataataagaggcgtttactatcttttcaaataaatgtttttgtacttatggtatactatatgtactttcgtttttacgaaatccctagaaagtatgtagaaaaggttctgacttttttgttagaaccttttcttattttttcgtaacaaatgcttcttttaaatttctgatccaaacagctttatgtaaatcggtatgagaaatccaattccctgattcatgagaaccgacaaattccttataaatgggatgccaaataataagatatgtttcattttcatattgtatctcatcaaattgccgcagcgattttcctaatatatcggattggccgataggtatggcccctttttctaaaatttctttaaactgtttcaaaggcatcacactccttagcataggtatatgtatatattttttaaagatgtattttttcctcttttattatagtaaatgaagagtggatattttaaaaatacatgtagaaaatgccctctatacataaggggtgaatgtcagctttgttatattactatgtatataatgaaagatttattgataggttgataggttattagataagtaaattagttataattaatatatagttttaattatataaaaaaccataataaagaaaggagttcaatcttcattagagtgaactccttcctttactatattttatattaagacatagaagaacctttaaatctttgttaggggtaaagatttaaagaaaagtttagcttaatgtcattttacatcattgcgtttctaataaaattgataattaatattctcattattaagattatttaggtgtataatacaaaagtataaatgctaacttaaatatgtacattaacgcttgaataaatatgtacattttcaattggattctccatactgactctgaggtggttagtatgtatattaagctagatattcaaacagaatttgaggttaaaagtctttcagacttaccaaattttaaaaaactaatggggaacttaaaaatgaagataaataaaagtcaattagccagagaattgaatgtggatcggcgtaccatagataagtatttgaatggttttacaccaaaagggacaaaaaataaaacatcgaaaatcgatacatattatgaagtgattgcagctcttttatctagtgattctaaacaaatcttctactacaaacgagtgttatggcagtatctaacagacaatcacggtttaaaatgttcacagtctgcatttcgtgcttatattaatagaaagcctgaatttagaacatattttgatgaggggaagcgtattttatcaggtcattcagtgggtgtccgttatgagacacctccaggagaacaagctcaattagattggaaagaaagcatacgatttgaaaccaaaagtggcgaaatcgtatatgtgaatgtagctgtacttttattgtcctactcgagatttaaagtttttcatttgaatatttcaaaatcacaaagtgttttaatgtcatttatgacagaggcatttgaaatgtttggtggtgtaccgaaggtaattgtcacggataatatgaagacggtaatggatgaagctcgaacagaacactttacaggaacgattaacaataagtttgcccaattcgctcaagattttggatttaaggtacaaccttgtatcgcagggcgaccaaataccaaagggaaagtagaagcgccaatgaaacttctagacgaaattcatgcttatcaaggaagattcacttttgaagaattacatgaatttgtgcaaaaattatgtgcaagaattaatcaaacatttcatcaagggactggtaagattccagtgtttgccctctaaagccatactacgttgctggtctgttaaatctttcatcgattcatgaagggttcctgaaatattttctaaactttgaatatgcccctgttgatcatagaatttcgatgataggaaagcggagcttgttgctaattcacgaaatgttgtttcacattttttattccatttcttcgctccttctgtcttcattacatatccttcaagagctgtttcaatgtctcccacacttctagacgctggtgtaactccatttttaaccaagaaatcaaatcctgcttgcgcattataagtgatgagccccagatctttcatttggttatatgcttctttagtagtggggttcaacctcatcagcatcgtttttaaagatgtacctgcatctgaaccttttaaaccattctgcgcaaatacagctagagttgtagctgtatctttaaacgtcatccctgctcctgctgctactgccgatgatgccgctaaaccatatttcagctcacgtacatctgttgctgaagcattagcggctccagataaaatgtttgctgcatccgcaacagaaagatgatctgctttaaatgcatttaaggctgtggatgcaatctctgccgcttcacctaattctagttctcctgctgtcgctaagttaagagcaccttctaaaccaccatttataatatctgttaaactaactccagcttttattaattcctctataccttgtcctgcttgaacactagagtattttgttgtttctcccatgttgacagctaattcgcttaatttcttcatttcttctccagtagagccagatacagctttcacattggccatttgttgctcaaaattcatggattcttctacagctgattttaaaccccgacctattgcataagtcattccgccaaacaccataccgatttgcattcctgcattttgcaaatgattacctaatgtctccatacgattaccaaaattcaataaacgattaccttgctggattttgtacatgcttaaacaagcgaaaatgtacatgtttatcttgacatttacatcaaattaacaacttctcctacccgtaatcctgctaaaaattgaaaacatactcctaacgctatatcactggcttctgcttcttcaataaactcataaacaagtctataacgattaggaccaaaatcttttaatttttgtttctcatttctctgatttctatttggtcgctcaatgtcaaaaaacgacttactaaataaagacaaaggctgtcctattcttaaataatcttttttgtaattcacttgaaaatcttcgtctattaattcgttttcctttaaatatatatataattttgtaagaacattttcacaataattagagtgattaaaactaacaccttcgtatgtcaaatgtgtaataaaatctccaccatgtattaactttaatccttctaaccctttattttgcaatgctttatatcctgcaacctcatcttcaatgttactatagataaaattaagaaatttgcatatgaccctagcagctttaagttgagtgtgataacttactcctctattcctataagtttttctaataaaatctgtaatagggtgtggaataattaaatctttcacagtattttttaggcatatcagaactacttcttcacattgaatctccttccccaccctcttttgtataatcacgcctcttggtatccaatggaatttctgatctaatgttctcaaactattctccctccttaacatccatcattttttattttttaaaatattcttacttttgaccaccttaattctatactcaaaataaaaaagaagctacacacttttaaaaaagtgtgtagcttcttttttattttgaattgtgttgttattgatgttagtaccccatgcccatcaacttaagaatttgcactacccccaagtgtcaaaaaacgttattcaagagctcctatgttctcttggatacatcgtagtgctgaatttaataatataattgcatcggatagtattactcaaatccctgcagtgaagggaaactttctttttaatggttctgtaatttcaggaccaggatttactggtggggacttagttagattaaatagtagtggaaataacattcagaatagagggtatattgaagttccaattcacttcccatcgacatctaccagatatcgagttcgtgtacggtatgcttctgtaaccccgattcacctcaacgttaattggggtaattcatccattttttccaatacagtaccagctacagctacgtcattagataatctacaatcaagtgattttggttattttgaaagtgccaatgcttttacatcttcattaggtaatatagtaggtgttagaaattttagtgggactgcaggagtgataatagacagatttgaatttattccagttactgcaacactcgaggctgaatataatctggaaagagcgcagaaggcggtgaatgcgctgtttacgtctacaaaccaactagggctaaaaacaaatgtaacggattatcatattgatcaagtgtccaatttagttacgtatttatcggatgaattttgtctggatgaaaagcgagaattgtccgagaaagtcaaacatgcgaagcgactcagtgatgaacgcaatttactccaagattcaaatttcaaagacattaataggcaaccagaacgtgggtggggcggaagtacagggattaccatccaaggaggggatgacgtatttaaagaaaattacgtcacactatcaggtacctttgatgagtgctatccaacatatttgtatcaaaaaatcgatgaatcaaaattaaaagcctttacccgttatcaattaagagggtatatcgaagatagtcaagacttagaaatctatttaattcgctgcacacatttcttctaatccgcgtgttgcctcccagcctaattcacgctttgctttcgatgcatcagcaaaacatactgccacatcacctgggcgacgctctgtaattttataaggaactttcttacccgaaactttttcaaatgcttcaaccatctctagtacactatagcccatacctgtgcccaggttataagcatctactcctgttgtactcagtactttctcaagcgcctttacgtgaccatttgctaagtccacaacatggatgtaatcacggactcctgttccatctttcgttggatagtcatttccgaatacgcttaattcttttaacttacctactgctacttgcgttacatatggcattaagttatttgggattccatttggatcttctccgatacgcccactttcgtgtgcaccaaatggattgaaatagcgaagtaatgcgatactccattctgcatctgcaaatgctacatcacgcataatttgctcaatcattaatttcgtttgaccatatggatttgttgcacttaatggaaactcctccgtaatcggtgacgtttccgggataccatatacagttgcagatgaactaaagattatcttctttacattatgtttctgcattacttcacatagcactaacgtgcttgtaatgttgttatgataatatgttaatggaatcgctactgactcccctacagctttaaatcctgcaaagtgaataactgcttcaattgaattttcttcaaaaattgcgtcaagcgcttcgcgatttaaaacatcttctttataaaacttaaattgttttcctgttatttcttttactcgatttatagattctaccgagctattcgaaagattatccactactataacttcgtaaccgctatttagtaattctacacatgtatgactaccaatatatcctgctccacctgttacaagtatgtggatataatttcctcttgggccagtcccaaacctcagtccttttataccaattgatgccccgactcctgatttagataggttaaatctcatcggtccaacgcgaatgcttttcttgatatgaaagctcattataactcctggtaaagcgaggggcagaattcatcttacgctagggcgatctaactgatggattttactgcatacgcttgagatttttaaatgagcattaatccatatgagaggacaatcgcgaattttatgcggaatagttcttagttacatactgtcgccctgattctgacaatgtgttaatgttttattcgaatacaaagaatctgagatgtcctgatggaatgccgaatcgattgtggggcctgttgcatcgctccttcaatatccagggaaaccagcaaatgtaaggtgtgttcagctatctaatgataatttatgtaacatttttggatcccatcttcgtcctaaagtttgtagtagcctgcaaccctctttggatatgtgttcaacgaatcgaacagatgcgatgacatacctaatcaaactcgaagatgaaacttgccccactgccactttgtaggtatacgcttataaactactgtagggcaggactgtctatcggggcgggctcagtcaactgcgagtgctaagtcgtttattgcatgcgctgccgcttttttgctttgttttgaattaaaaaaacgataagatcttagttgtaaacacagtatatcgataattaattttacactggttctatatctagtgtcttaggctttttggttaaaagttgtacttctatagtttgtgagtctttatgcttcagctggtttggctttttcacgtttaaacctcactagtacgtgggatgtgatggatagagttgaatgaagagtcatccttatatagtcgatgttggtgacaaagttgtgattgatacagaaagcagtcatgtcagtattgaagggaaaaacgctattaacataaaagatatttttagtaattttcctgttatcaataaagggacgaataaacttgaaatcataccttccgatataggaacagcaaaggttacatatagggagcgatttagatgagaacaccaagtggaatattacatgttgttgattcacaaacagatcaaattatcggagcgattcaatcaaaggattattggaatgacaataggcattgggagattaaaaataatgttgataagctagattttacggtttttgatggtacaaaagaagccgcagcgcttacgcaacaaaatttggttttaaaagaggtaaggggtggacgaattgttccatacacaattactgaaacagaaaaagattctaataatagatcccttacaacttacgcgtctggtgaatggattttacttggtaaagcaaattatattgatccgcaaaagtttgaagcaaaaacagtagcagagtatgtagatatagctcttaagggaacgaaatggaaaaaaggaaatatttcttataaaggtttccgttctatgaccgttgatgaatttattgatccattaagttttttgaaaaagattgcttctctatttgaactagaaattcaatatcgaactgaagttgtagggaatcatatcgaacggtatgttgatatgatgaaaaaacgcgggcaggatacagggaaaacaattgaattagggaaagatttaattggaattaagcgaattgagaactcgcaaaatatctgtacagctttaattggttttgtgaaaggtgaaggcgataacattattacgatagaaaaaattaataatggtcttccttatatcttttatagtatatgtattgaagttgttcctccctaatttataagacattccccagtgtcttaaagcagcttccatccctaattaaattgacataaattgtccccttccttgaccatcttataaatgatggtcttattttttgtctttctatcttttatttaaaacttccactctctttcactctatgttcacacagaggtcacatctaccttttatagtatatgtatcgaagttgttcctccctaatttataagacattccccagtgtctttgaacagcttccatccctaattaaattgacataaattgtccccttccttgaccatcttataaatgatggtcttattttttgtctttctatcttttatttaaaacttccactctctttcactctatgttcacacagaggtcacatctaccttttatagtatatgtatcgaagttgttcctccctaatttataagacattccccagtgtctttgaacagcttccatccctaattaaattgacataaattgtccccttccttgaccatcttataaatgatggtcttattttttgtctttctatcttttatttaaaacttccactctctttcactctatgttcacacagaggtcacatctaccttttatagtatatgtatcgaagttgttcctccctaatttataagacattccccagtgtctttgaacagcttccatccctaattaaattgacataaattgtccccttccttgaccatcttataaatgatggtcttatttttttgtctttctatcttttatttaaaactccctctctctttcaccctatgttcacatgagagtcacacctaccttttatagtatatgtattgaagttgttcctccctaatttataagacattccccagtgtcttaaagcagctgcaagggctttatcttcaatcttttctccacgtaaacccatttgctctaattcagatatcaggcgatcaaaacctaaaaaatcaacaccatcagccattcattccaccacgcttccacatgattgataaagtgtgtttttcagttggaataactgaaacaatgtcataaattacgttcttatatttaatcttcatatcagcattcacatcagcacgatatcggatttctgtttcaccttgaatttcgctattagctgccgctgcttcaaaatattttcttccctttaaaaaaataaaagagccccatacagtaaaggaatccttgtaaccttctattggatcaccgtccgggctctttgcttcctcgtctttcacttgaaaggtaagacgtttatctaatttacctggattcacttgaatcaccaccacaatattgcaactgaactaatatcgactgcaaactaaatgccaattgttcagcttttccaaccgcttcacggttttcatgccaatgagcaattaaaatacgagctgctaatttagcaagctcgctttttaaatccacatttttacttgtagcatttttaatatatatttcagctgcttctacgaaagatgtaatgagatcgtcctcctcatccccatccacacgaagatacttttttgcttcttctaatgttagtaccaagaagaacccctcctacatcattaagctttggccgtaactgtaatttgaccatatacaaccgcttctgtatcccataacgtaacgtcttcacgttcaattgctcggaattctgttgtattacctctccaagcacttccaccctcttttgtcatatcaagcgataactgctgtctatcccataacacaactgcttctttcaggtccccaactcttgagtggtattgcctcctgtaatatctgtattaacatcgaaaaaaccgatgaaataaatacgcaaccatctaataattaaaatattcacctggcatcctacgagcttccataacatgttaaactcgttaaataagtaacttcaaaaaaaaataacaaccaaatccttttctaatcttgatggaaaatgtcattgatgaatattcttatattgagcaaggacgaggcgtaaatagtcgattacgccttctccggaatcgaggagtgtaaattctactgtataagacagcgacctgctgaattgattgtgccgctggttgcaaaagcatgactctccaaccttaaactggtagcggatgtggtctggtttgctaggtaataatttctattacgtaataaattttcttatagtgtattcctaaaaatacttgcctgaaataagtgtgcttacacctgacttaaacatatccaaaagacttttgctttgataataacagctagttataccaagcgatgtggttggtcagaaaacgcttccttcggaaagtttgaaagcaacctcatgtcattaaacacaaccttggcataatcaggtaatgaaccagaatgttcaatactttatccaacgtggcatttaattgtgataagaattgctgcggtgaagtcgtatttgcgtatcggttcgagccttcaccagatagagtagtgtcggataacccaggctgtaggtcaccagtacatgcatcgaaccggtaaacgcgatcggctcgctggtatcaacatcattccctgctctaccggtaatgcaaccctgttgctgattgctatcttagatgcccggcacctgaatgaccctagctgcctggataatcccgtcctctataatcttggcggccatttgataggtctcataacccttttgatgaagtttatggggtgagctgcttgagggaaaacctcacgagcagttcttatggggagaggctggaaacggatcacaactgataccgcgccagtcttttacccgacaaattttatttaaaacgtggaagtcattctttcaaattcatcattgtaaaaagataaaagcagaacgattagagtgccatttatatggtcaattgattgccattctactctgttcttctatcatgtttcaaatgcgccaattgctcctcatgaagaaaaaacgagagcttagtgagtataaagccatatatatgattaaagactattttcttcttctattccaaactatacagaaaaacacccaagagctatcaaaggtgttacttcgtctgttcaatcttctacagcaaaacgggcggaaatctcatcgatatgagaaaaaaacggtctttgatatattaggtgtcgtttacaattctatgtctgataatcaagccgcttaattcaaaaaagtgaaacccggtagggtttatttcgtatgcaaatctttcaatcacctatacttgctccttagaaaaaagaaacaatctcgcctaaaattgactttgcataagcttaacttgatagcgatgtggttttacccctatacgtagcctttagaaaaaagaaataatctctactataattgacgttgtatgagcttagcttgatagcgatgtggcggtacccctatctacagctctatcaaaagttttattccactcaatcccataaccattacatttttcacatctagcatctaatttcggtaacatcattaaatcctcctcgtatattaatatttaagtcctatttcagacttagattttttctttaaggctgactcttacacagcctaactatttgttcgaattttatgggtgaaactcccattctaggataatagctcattaatcctagccatgatacccctacatgcgctaacttacacacgagttagggtctgaagttaggtaaggtcgtaacctgatggcacaactcactaatgcctatatggtgcggtggtctttaaaaacattccaatggtgacgaaaggaatccatgttttgaagcgtcgtgagggaatcccttcttaacgtgagcaatcggaaggaataacgggaacaaggagaggctcgaagttctaatccttgcacataatcggtttcgtaattaccgattatgctgaaccagtatgttagagctactcaagactggtgagtaccgtcggcgtaaagtgggcacctaaaggaatgtaaaaataagggatagaacaaatggaacttgggaagcttgcattgccatagggagtgtgatcctgcttgaaacaatgcaagtggcagcggtctcgtagtagtgaggaagcggagtaatgtccgtggagcgaaggggaccagtcgattcagaataacaatggatatttcaaatgtctatatgaacctcttctagagtgggaattaaacagcacatcgttacaatcgcttgaataatggggagacgtaatgaggattaaaggacatttgatagataatgaagcacagctccaagataagttagacctaatatacaaaaaggccaaagaagataactcttcttttcatggcatgatagaactaatgaaaaacaagcagactattaaaacggcaattcacaacattaaaagcaatcgtgggagtaaaacggtcggaattgacaagaaagacgtgaactactacctcttaagtgtagcgagtttcattcgtaaagtagcaatgggttatcaggttgagtctattgtagatattaaacaggttatagaactcagccgggtaaatgctgatcttggtcgacttggtgggttactcaaattgtggctcgctaatgaccctcgcacggttaatttttcacccacactgataaaaacgttgcttgagaaaatagaattaactagatatgagctaagaattattatggatagaatattggataaataaatgtatggttttctatctatcttcatctgttaacagtctaaatgttcactatcaataatcttttaaattgaggtaagcaaatgaagttattactccgagtattttcatcacagggaggaattttagccgctaaaaaggccttagtagtttctttcgtggtgtcaatcatggcattaccggcgacagccggtatccctgtcatagatggtactaatgtggtgcagaccacaatcagcgcagtcaacaacgttcagtctgtggcaaaacagatccagcagtaccagacgcagcttgattcatatctgaaacgctatcaggacgtgaattactaccgctcatcaccgtgttttaacagtaatgttgaatgtactgaggatgaaattagcgcactgcgtaaagctgaacagaacagttctgaggcacgtaaaaaggccaatgacgccgtgtctaaggctctcgacgaacagcaggaaacactgcaaagcgatgctgataaccttgcagatttgcaaactcaggcaaccagcgcacaagggcaaatggaagctattcaggccgctaaccagcttgccagtgctcaaacgaaccagttgctgcaaatcccgagcaaggacaaaaccggctgttacacactcgggtagacgatcgtaaggagaaacttggaaacctctttaacatcagcgatatcgaagccgagatcgaaagctgcaacactatatacactaaacttacaaggtacatcaacaatccagaacgcacggcaaaagttgcatcacttaaagaagagatagccaccctgagggacaccttgcaggcagaggctggggtagttgagtacaaaaagctctcgacgactgatgtccaacctggatgggacaaggagatactgttctcatcgtattctgcggtagaccatgcagcctaccaggaatcagttcgtaagattattgcccttctgccactcaaagctacgataaaaactaggattcacaacgagacaatcgatactgccatcgagcgtaacgaggaatcactgagaagcctggctcggttcggtaaagaccttggcaagcttgatgggcttgaagctatcaagcaggatattgatgaattagagcgttcagcaaacatcatcaaacgcggtgctaaggccatcaaggtcgaagaagcccgatcactatcaaactgggaagatgggcgccttgagtggtttgagttacaaattgaatcccgaaacagactagaggataaaagcagcaccaacgcgaacgtcgtagccgaactggaacatctaaaaaagcaactgcttgacgaacataaaaagtcctatcccgatgataagatgtgccccctctgtggtgctgactggaaagatcacaaatcaatggtagatgccattgaagcaaacactaagcagatctctgattcgctagggcaggacggtaaagacttagttatctaacacgtaaagacatccgaaatttatctattatttttcaggagatgggaatgtcaaatgcacgtgtgaatggattaatgagcgcattacgttcagctcttgaattttgcgctgatgatgatgactatgagtatgaattcaatgtaggttcaagggtacgtggtttacctaagaatccaattagagaaattacatttattaatgatgaccaaattaattggttaattgatgaattactggaaaaagagaaatatatgttggcaacgtatttaactctttcttattacagtgcagcgagaaaaaatgaagtttaccaggttcagaaggaaggactgacagaacaatattatacaaatgtggtcagaggaaagcgcggtaagaagtttagattatattacaatccacgagtacagaaatgtattcgtttatatatagatcaacgaggtaaggatgccattccggatttgtttgtacgagtttataagaatggtgagagaagacaattaaacaaaagtgtatttaattattggtgcaagatatttgctaagatgctgaacgaaaaggaagggaaagagtttaaagtcaatccccactgtttccggcatagcagattagataatttaaaggtgcaaggtgtaccactcgaaaaattaaaatcgcttgctaatcattctgatatttctacaacggaatcttatctgaaggatagaagtgaagaagatattgcagagatatttgggatggatccaagttgctttgcagcttaatcaggagcatatgtatgcttctttttttattgataaaaagaccaactatgagaagtcaagaggaattttataaataggaaattaaaaaagtgggtgattaaagaggccggattgtaataattgtacactccggagtcaattctctttccttatttcccgcgtatttccgcacgatttcgcgtggaaaatgagcaacggacgacgcaggaagatgagcatcacgcgccgggtcgaggattatacgggctcgccaacaaagcgcaaggatcgtcccggatcttcgttagatcatttaagccaaaaattgtctgtgctcattaaattttccaatatgcggcctaaatcgcgaggcactcgcgtcaggatcgtttacacttacccgattccggatcttcctgtggataaatcgggaagaatctgtgagaaacagaagatctctggctcagtttaggctatgatccgcggtcccgatcgggatccagcgatcctggtcgggcataaacacaacatcgttcaggctgtatcaacgatagcgtgtataaccgcagatagcggttcgcacatcaccctgatggggtcatgtcgatgtgcgccaacaatcatgaatattcaatagttttcttttattgttcgagtggagtccgccgtgtcactttcgctttggcagcagtgtcttgcccgattgcaggatgagttaccagccacagaattcagtatgtggatccgcccgttgcaggcggaactgagcgataacacgctggctttgtatgcgccaaaccgtttcgtgctcgattgggtaagggataaataccttaataacatcaatggactgctgaatgatttctgcgggtcagatgccccacagctgcgttttgaagtgggcacaaagccggtcacccaaaccaaaattctaatttaaatcctgattctgtaacaatatccaccatgtatgtatctataagtggctcataaataaaatcatgatctattgtgatttgttcagtcatttagctcaccttctatcggtgaaagtgtaataatcatttgttgctctaaaacgttccctatcacagcattcatccataaattaggattcatttttctcattaaaaattcgatgactacaattaactcttcggtagataaggaaacaaattctcctaaaggttcttgattgaacctgccaccacatttttcaattgttagacctacttcgttgtcaatcacgtacctttttgcagttactaaatcaaattgacggactttctcacggccgaatcctattattaattcctttagtacgtcatgaatgacacgaaaatctaacacttttactttctgttcaagctgctctctacactgcttgcataaagtcctttccaaaccagaaatatatattttactcatatcagactcaggaaaaggattttcgcatttataacactcttctccaattacatcttcaaatggatttaacatgtaaatcgctcctatgatttatatttgtttagcatttcttgcaatctctcacgctcttcatcaatagattgcgagttttgcttttcaatttcttttttagttggctcaacatcttcacgtaaccaatctggaacaatttcttttctatttgaacgacctggtcccgaaccattcaatcgcttattcttactcatttcaaagcgtctatctaatgcagcaacatcatctaatgtttttacgaggcccgtcatggcctcacgagcgataaactctatttcagaaacttcctgccctgttttttttcgtaactctgcaatttttttggctataagcgctgaaatctcttcctctgccttttgtgtcagggcgtcaactttcatctttacctcttacgaccgttaactgtatccattctctaaatggttttaaccataaccctttgtaaagcgtagactatctgcgttacgtatgctgcattaaccttaagatgagcagcatgatggagccgtcacatttaaacatgcatttatgttgcattatttgaacaagctgttattgtcccaaagccttagagcacataaacataagaaaagttttgacttaaactcgccccgcatcaggggcattttttttggctgtctgtaaacaaaaaacccgccagaagcgggtttttgtggtattcgagaaaattatttaaagacttctgcgacggcctggaagttagggccatgctcgcgggcagcgataatgacgtagtacttcccgcccttctcgtctgccagttttgagagtttttgatgaagatccgaaggtgaagaaatttgtccacctgaagcccctacagatacattaccaaggtattcaagtttgaagtggtgcgcttcatccttggaaatcatatctgccgcagatgcgccgaagcttgctactgttaaagccaatacactccctaatagtgcttttttcatatcattcctcctgttgatgaatctatatatttaacattagcaccaaatatgtaaatgatccgtatcaatattgtagagaatgataaagagaaaccaccagttggggctggtgatctaatagaaacacatgttgcgtacgagatgcaaaaaaagacctgttatagcaggtcaaaagtcagggtatttcgtgaaagaatataacttattcatcattctaacaggaaaaagtgaaaaataaaagattgaaaataaaaaatattaaatctttttgttgagaaatatcaaataccctagtagtaaagatatattgaaaaaatgttagatagagaagggggactggaatgaataccaatgtaataaaagtcgcaagaataaacctgcaaggtaacactttagaccagggctggtttaagtaccttactttagaaaatggcaagccctatatggttgcgattacaatacttagcgaaattttttattggtataaaccaactgaaataaaggatgaaagaacaaatgaaatccaatataaacaaaaatttaaagcagacaaacttcaaaaaagttatcaacaattggctgattcatttggttttaccaaaagacaagtacaagaagcatgcaaatacttagtaaaaagagaattaattgcaattgaatttcgtacgatcatagttaacggaacgaggcataacaacgttatgtatgtggaaccaattgtgaagaacatcgaaaaaatttctattttatatcaagaacctatcacatcagaaagtgacaccctcccacattctaatgagagaggctcccacactaaaacggaggaggctcctacattgaaacgtgggacaaatacaaagattactacagccgagaaggtggaacaaattcagtgcaagtcttactagatattgcagaagatttcgaaaaacaaaagctgtatttggcaagattacgttctagtttgtcacaagcacaacgtgcttttgtacagaactgcttaatcgtcatcgctatgccgatagttattatgttgatgtcaaaagaagcatatggatttttagcaggttctatgatggggaaaatcgcgttagcggtaaatatgttcattgtctttttcttagcaacccgtgtagaaaagattgcaaattataacccaacagaaagaggggaataaggtggctacgattttagctgtagtggtattcgttgtcatgtactgggtattctctacctttctacaaagtaaaaaagacagcggtagcttacttacgaactatgtagaaaatgcaaaacgaattgaaaagaagaatttaaatcagatgatgctcgcgcccttccagtcgttatcacataagtacctgacagaagaaaagaaagagcagattcagaaaaaattagaagaagctggcctggatacgaaaccagaagaatatttaaagatgaaggtagcatatcccatcattttcacctctgttttcttgatatgtacggtgttccatgattactacttatttaaagtgggagttttgatttcaccactgctttatttctatcctgattatctattaaagagaagaatcaagcaggcgatagaagctaggaagttcgaattaccagagtatctaattgaaaaagacaattggtgatgcgcttgcccctgtggttagtgtttttgttgctgggttgcagaaacttgtggatggattcaacgcattacctggaccagtacaaaaggctatcgcaattacaggtggtattgttcttgcacttacagcaatagcaacagcaataggtgtagttcttgctgcattcgggatgattatgtcaggaattggagcattagcaacagcattaggaattgctggtggtgctgcaggtcttgctggtgctgcggttggtgtgttaggaagtgcattgggagtgcttcttggacctgttggtttaatagcagcagctcttattggaactggggttgtcgcatataaagcatatcaaaaagcaactgaagacagtatcgcttcagtagatcgttttgctacgaataataagttagcacaagatgaatatcaaaaagctttagctagttcagatgcagcaacaaaaaaatatatgaaacaacaaaccggagaaattagttcatcgactaaaaaagttcttggcgactattttaagttatccgatggtattagacaaaagctaactgaaattaaactgaatcatgaagtaatgacaaccgaacaagctcaaaaacttggtcagcaatacgatcaattaactgagaaaatcattacaaaagttgatgagcgcaagcaaaaagaaacggaacgcttgagaaaattgtttgctgattcatatgttcttacgagtgaagaggaaaataaaagtacgcaattgaacagcttaaatcggagggctgggtcaatgcagtggtgagtgaccgggagtggggcactgaagccctgactgaagaatatcgtgatattgatgcgctgctggtaagaaaatcggcactgaccgatggattttctaatgaaggcaaactggttgcgccggttgaatttcaggtgacgggcaacctgtcagcatgtatggcggttttcctggcccatgcactccctgctgtcgtgctgaagcctgacaggatcgccatacatctctgatagttattgaaacgttttcttccgggacatgaaaccgcttttgttcctgatgttttccttatcgctactgctgtatttcccacatgaagcaaggttatggcttactgccccttttatccttactgatctaaaaccatatctctgaaaatgaatgggtattttaatttttccgatattgatttggatcaattcaaggtcattctgttaacaaatctccgttcattttaactgttgcgaaataaatgctcgttttgcgcactagttgtagttcattttactggcatgtcagtgcaattcactattaacatttagtagaaaattcttaggaattttctctatgccgattaaagatcgctatatttgatcttaagtcgattattattctattatcgcgtgtaaatcactttagtctgaaagtgcacgcagcgataaaccgagggatgatgagatggctgatagtttccagaatgaagtgcctgaacgatgcagtaatcgatttcctcttatgcgctagtgatattggatacacaaaaatgacgaatgtttattttaaagaaaatccatatgcaaaaacgagagagattatagaacttgcacaagcagataaaaaagaagcatctaaaagattacaaacgtacatggagaaagaatggtttaaaggccattatgattatgaatggaaaaatgcgcataaagaacctggatatgtagggtattggagctttgagacagctgcaatagtaaagatactcggacttgatgatacaagtttaaaagataataatcattatccatatgatttggcacattataaaaatgaaatgaaattcaagcatatagacctaagtgaatatcactatgaagatgagacagaagaaatcgaggatatagtagaaggaattgaacataatcctgcattggaaaatattattccgccaaaatggcattcattggtcaatgaattaatacatgactatgagaatatggatgatagtagtttttatgaaaaatacaaaaaaacgataggaataggtcaagtgtggttcttaccacaagagtatgaagaagaaaatgaacaaaaaaatctattaggaagtttaattgtgtttgccctgacggtaagagattatatattacaactggactataaagaagatttagaagactacattgataatcttaaaaatttctggaatgtttcagaaacaaagttagcgccagtacgatactgaacagtacactcattttagtccttgacatattttaactcccggtcaggcttctgtaagaaatacagttcttataatcgtcgatactgtcctgctgataacagatggccaggaaataattttctatctgcgactttttaaacctggaatagtaagcatctgcaacctgatgttgacagtcgatatgttgactggcgatgacctcttttacgtgattaaagtagtgctgtcgcggctgatacatattcttatcgatcaggtataccgtacaccggtccactttaccgagcagatgcatatcagaatctttcaggctctcggcataggaatccctttggtgcaacagtaaaacagcggtgccgataacggtaatcagtaataaggtgcagagagaaataaagagtctgtgcagcgatattaattgtttaggcggatcggcatctttcttatgcgctagcgtatcgaatgattcagaggcagattgttcactaagcgttgaaacaaccggcggcctgaccgtgtggtgttcaatatgcgcggcaaggctaaatcccttgccacgtatcgtttttatcagtaaagggtcgcatcctaatgtacgaaatgattttctgatttcacttatggcaacattcagactcaccgaagaaccagagaaaccatgatcctcccagaccttctttatcaggtcgtctctgtcgagagttttaccctccagataaaacagtattgagtccatcatatcagatggactctttttttactgtctacctataggggataataccagatgcgtactctttttttgggtgattatattccatcttgaacagatttctttacaattacccatgtgtctttctttttaaccgttatagctacattagttccattagattccttataaaagatatatccattgtttgagtttacatatgtaactggttcacctatgcaatctcgcgagcaggatttgttgactagttcaattaaggatagttcacttggatcggttttactggcttctataacagcatcaaggcttgtttttcgataaccttgcaagtttatatgaaaaagctgctctatttctcctgtaatgctagtgttcattacttctactgaattctttttttcttgaagaaagccgttttcataaagtaattttgtatagccaatccatgctattaacactagcatgaaaaacatacccgtcattttaagtattcgaagtcgtttgcttataattgtttctgagtatttcattcactctaatcctccaatgtttttaatttaaaatatgcttggatacatacttttagaagaggatgaaagttaatgagtttttaataaaaaagaaaacatccagggtttaaaatgtaccctatagaatagacacttgaaaaaagtctattctatagggtatttgttgtttggaagttaggcttatccttcttcgtttcgccttcttcttcctcttgtgaaagcttcccttttaataaccaaacatatcgatattttccattgccctttaagaaacgccatccgattgctaaatatggcttttctccctctcgtttttcatctaatacgccgtctgtaacttctggatacccttcaatatctgctttcgctgataaggaaagtccacgaacttcaatttcaacttccacttctccgtcagattcagcaatctctgattttttattatcactccacataatttctgaagctacttttttagaagttttaaccttcactgccccttctaacttctttacatctgcatatgaaacacctgatgcatcatcttttaatagttttgcataaacaagactatctacaccgacagtcgaactaattgtaataatttctccagccatttataactccactcctttcgcgaatcgcatcgcgtaatgaaaaatttgtgtatcattttcatacaaatcagctactgcataacgtgagaaaccaatatctttcatgatttcatttactttttgatggattgctgttgtactcccttttgaccaaatatcgatttggaatgtgatttcactttcactttcatcattatccgcaaatccatctggtctattgtctagttcaaaaaacgtaatacgcggaaactcttcagcataaccaactttgaccaaggtgaagcttcttttgccttctttccacattctgatcgtgttaacactggagttgttatggcttcttctacagtccacttcaaacgtttaactctgtcacgtgccgtattataactaataccatttaattcagcttgttccgcttgtccatcagttaacactttatttttacattttgaattggcttgttccgccaattttaatgcttgatatttatctataggtggcttgctgattgcatcaatcaatctccaacctttttttattcttgctgtataagttgaatgagagataccatttttcaaagctatttctttaatgtttttccatctatttgcgttatatcttgatggttttgtcattgcaatttctttgtcccatcccaaatttctaatcctacgtgtcagtaattcattactaattccattctttgcagccgcctcatattcttctggagttatataataatcatatggattccgcatgagtatcttctcctattcaattgttagttaagttcttgaatttcttttaacgatctattcgaaacttcaatactacgaatcttaaaactataattcttacgatatttttcacgaatttttaacgccgcttcttctttcgtttcagcttcacaaaattctaatttaaatcctgattctgtaacaatatccaccatgtatgtatctattattctttatctatgcaagcaacacggtaaggtatatttatgggatgacggggttatggatttcgaggaaaagaaaaaaagtgcatggatagaagattttattgtgttaaccccttacttcctctggttaagaagtgaagtcggtgatgacgagtgcaatgtggcgagaagtaaattttctattaatgcatttatgaaggggcaccattgggtaaagttcctttgagaaatttaggtggtggaattttaaaaggtacaaatctttcaaacaagttattagattttgtatcgctagataacctaaaccttatacagccaatgaataatagtcacctctacatatattgttcctctgctgttaatctcgtgatagatggtagtgtcgcatttcttaagtttaaagaatgtaagttatcggaaattcaaataaagcataatgggataattttacaaaatggaagttttcaagaattttcttttaatagatgtcatattgatttgaaactctgttcggcaaatatcatgcacatgaaagttaatggttgtaattttaatgcggtttgtgattttgctcgttttgatagccaatgtgagttcacctatgatcgaaaaaggaaattttcatatcaatcagaaagtgatttcttcgatgttgtcacaaagttgtttagtaatgcaaatgattattcaaaagcaggtgagtattacaaaacgatcatactgggtatgagcggtgccgtcagtatctacgccatctgcacacgtcgtggtcatacactctgaggtgatcatgccattaattgtgctgttagaaatactcaacgcgttcgcacggccattgacaccatcatccagatagtatgtcgaaataactccgtttacggttgatttattgacgaccggataaatgtcaccatcatgtgtggcatctgaataattccagtcagcataaccataataccagggcgtggacgcagtattgtcatatccaaaagtattatatgtcgtgccggatatatctttcgcattggcctgagaagcgatagtcagtgtgcaggctaatgcaagttgtgatacaaccagtttctttttccatgtttgcattgggtcatccctcctcagggacgtaagcaagtttgtccatcaaatcatttagcaacattaaattgcggaaggaattatgcagtttcacttcgaaaaggttcaatgaatgattccattaagtccgtattcagacaaataagcttataaacccacggcaatatcaatcattatgaataaatattataaattcaactgattgcaaactactttagttgcttcgacacatataataaaaagcaattaatcatttatatttataatcccaaaccaatatagaagcctcaccaatattacacgccacgctgaacatggaagttaggcttatccttcttcgtttcgccttcttcttcctcttgtgaaagctttcctttaagtagccaaacataacgatacttattatttgcctttaaaaaacggtatccaattgctagatagggcttttcaccctcacgtttttcgtctaatacgccatctttcacttctggatatccttcaatgtctgctttagttgaaagcgaaatactacgaagttcgatttcaacctcaatttcaccgtcagactctgcaatttctgatttcttattatcgctccacataatctccgaagctacctttttagaagttttaatttttacagcgccttccatttctttcactgcactatagtcaacacctgttgcatcatcttttaataactttgcgtaaacaaggctatctacaccgacggttgaactaattttaattacttctccagccatctataactccactccttttgcgaatcgcatcgcgtaatgaaaaatttgtgtatcctcttcatataaatcagcaatcgcatagcgtgaaaaaccaatacttttcataattccattcactttttgatggattgctgttgtactaccttttgaccaaatatcgatttgaaatgtgatttcactttcactttctttattatccgaaaatccatctggtctattgtctagttcaaaaaacgtaatacgcggaaactcttcagataactatctagcaatgatgcaaattcaagtttctgaccctgtaaattcacaagcaaaagttttgcccccatcatcagttcaaaatgaagattcatcgtacaaagaagtgtttatgaaagctatccgtggtcaaaatttaagtcatgaagaagcaagcgttatgcaggaatacaaagcagcattatctgagaatacaggtaaagacggaggttatattgttccagaagatattacgacaacgattaatcaattaaaacaaacggttgataacttagagcaatatgtaaatgtgcaacctgtttcaacgaataagggagctcgcacattagaaaaacgtgcagcatctacacctttcgctccattatctgagtatggaaacccaaatgcaatgcaagaaattgcttcaccacaatttgatcgtttaccgtatgttattgaggattatgcaggatttctacctgtaccaaatgatttattaaacgatacggatcaagcgctagaagcttatttacgtcagtggattgcgaagaaatctattgcaactcgtaattatttaattttacaagaaatcaataaattaacaaaagttgatttaaaggattataaaggcattaaaacagcattaaatgtcacattagacccagctttctcggctgtagcaaacattattacaaaccaagatgggaataacgttttttgacacttgggggtagtgcaaattcttaagttgatgggcatgtgacggtaccccatgaataggatattcataataatagttccaaccagatagatatctcatgataaaatagaaataaaaggaaagatggtgaagatttgaaaaaaccattaaaaacttcaacaattatagtaaccattatcaccattatcgcttgcggaataggatttgatttttacaatcactctttatctccagatacaatttatagtacaggtattataattattatttttcttctttttagtacaagtattaccgacaagtctaaaaatacttctaagccaacaaagaaaaaggtcccagcaatattttggtctaatatcctcataatgatcattttattcgttgtaattagttttgtaactacaggtcatatatccattcaaaatctaattttatttatgtgcttaattatatatggtggttttgttattattagcattctatcaaagaaaggcaagatatagatttattaacttccgagaacgagaattatgtaaataagctgtccatatgggcagcttattatttttttgcttagcgtggtttttttccaaaatgctggcggtaccccatccctatcaagctaatagttttaattaccccataacgaaatttttagattgtgaaaagaaacaaatagaggcgattcaaaagaatgatccattgttactttgtacttggattaaagaagcaagattggctcgacgggagcttatagcgctataccgtgagaaagaaaaatatgatacccaacttgaacgggatcgtaaaagcattctagggattgtggaacatttgaaaagtagaggtatcaatgcttcagttgtgaagagggcgcatcataatacgctttctgaagagtgctgttaaaagtaaaaaagccctataaaataggacttcttctgtacataggtcatactacttgtttcgtgcactgacattcatcataaacagtatatcagatatattctgaattatcttcatgtaaatgctttagaatgacgaaaagacctaaaattaggtcttctcatcggcaatatcagtctagaacagtatacctaacaggagtgagttaagtaaccggaatgctcttatagtatagcaaactattacatttaaaaacaagaagggatggtaaaaggaaatgacagcagaagaattatttgaagaaaagaaatatttagtgattgcagcagttaagcaacaatttggaagtatcgcaagagctggacagattgcagaaataaacaatatggatttggatgatttaatacaagttggccatcatgagtattttaaagcttacttttgaagcgctagaagggcaaaagcaagaactccagcacatcaaatcagatgtcaaagacttacgagaaaatgcgccgttatttgctgtagaatgcgatgaaatatcaaatgcagtcaagcgtcatggcgttgcgctattaggtggtaaacagtctaatgcgtaccaacatgcggggattagaggtaaggtctaccgtgatatctataatcagttatatcgtgaatttggagtaacaagccataaagcaattaaacgtggtcatttggcactcgcaacaaagattgttggagcgtatacgttacctattgtgctgagtgagaaaattaatatagtaaactctcaaattaagttttctgagatgtaaaaaagttggaaggaggaaataaccatgatggaagaaagtgttttttcagtatgtatcactgggtttctgatctgtggacttctacttgttgtttatgcactagataagccaattaaagaatttacaaaagatgtggaatgaatttgaggggagaaagcgctatgacggtatcaattttaaagaaagatatacagaaaaaacaaatactagatgaattcttggagcattgtgaaaagaaacaaatagaggcgattcaaaagaatgatccattgttactttgcttgtgaatttacagggtcagaaacttgaatttgcatcattgctagatagttatccaattcatttttcgcgtttttcgcttcctcaattttcacctttgcatcttcatatttaccgctgttattaaacccttccgctttcgctttcaaatcagcaactttctgtcttaattcttgttcacgtttatccattccgtatttcctcctttttttggcacaaaaaatagacctatagctctaacaggtctagtgcattttgtatttttaattgttcgttattatccttctttgaaatagaaggagcctttgctacaatcttatttggtgttttttgatatttatcaaagtaatcactgctacaagctgcgacttcttttgcttccacaacttcaatattgaagtatttttcagcttcttcaccacttaaccaagtctcagcatctactaattgctgaatttcttcaatttcgataccttcttttaagttctctttgtatacattcatgattcctgtctcgatgttatcaaggtcctctgctgcttttcgtaaatcaattgcatttccagctgcatatgtccagggcttatgaatcattaagaaagcgttagaagggacaacaacacgatcaccagccaaggcgattacggaagcgatagaagctctattaaactatctgatcctaactctatagaatgatgctttgttcctacatattcagccacacgtttcacccaaggttcatcacgatcaaaacgaaggaagtcttgctcaaagtctttttcatcattgatgaaattcagagaatatgtatgaagacgttcccctttattcccaaattcgtttcctgctaaacctgttaaaccactggaatctaaacctccggaaagcatagataccactggtttatcagcaattaactgacgtttaaccgtatcttgtaaaatggagcggattgtctcgactgttgtatcaatatcatctacatgttttttactttcaagtttccaatactgtgtcgtagtcgagccattagaggtaaacgtcatataatggccagcacgcacttcatgtatatccttgaaaatagcatgaccaggagtacgtgttggtccaaggcagaatatttcagaaagtccttctttatctacctcagcatctacaagtggatgcgaaagtaaaacttttaactctgaaccaaagagaattgcgcttcccctttgagcaaaaaataaaggcttcacacctagatgatcacgaccaagcatcaatttcccaaatctttcatcccaaataccaaaagcaaaaatcccatttagcgtaaccattcatgagatcgagaacaatacagacgaactgaagtttagcaactgtgtagaagaggaagtatatccaaacaacacggtaacgtgtaatgattatactgcgactcaagaagaatatgagggtacgtacacttctcgtaatcgaggatatgacggagcctatgaaagcaattcttctgtaccagctgattatgcatcagcctatgaagaaaaagcatatacagatggacgaagagacaatccttgtgaatctaacagaggatatggggattacacaccactaccagctggctatgtgacaaaagaattagagtacttcccagaaaccgataaggtatggattgagatcggagaaacggaaggaacattcatcgtggacagcgtggaattacttcttatggaggaataatatatgctttaaaatgtaaggtgtgcaaataaagaatgattactgacttgtattgacagataaataaggaaatttttatatgaataaaaaacgggcatcactcttaaaagaatgatgtccgttttttgtatgatttaacgagtgatatttaaatgtttttttgcgaaggctttacttaacggggtaccgccacatgcccatcaacttaagaatttgcactacccccaagtgtcaagaccaagtttctttcatcttttgaacgacatcatctttcattacttggtatttggattttatctgaccagtttcccaatcaacttgatttgcgtgttccccagcttgggattttgcttcactcacaatttccttatgcttatctcgtgctgttgaaacagtgctgtcatactgacgtttggcttcggcaattacagcctcagcttcttgtgcatttaaactgcctatctcatcgcgttgtctaatggcttctgctattttgtcattacgtgtcttttccgcatctttaatgactttatctcttgttttagcactattttcaacaacttctgctgcttgtcttgcggatatttcactagcctgtacacgcatattctcaagaattactttttgctccatctgattttgtgtcatgtgctgaacagctattctatccatttcgtcttgtaaagcttgaatagcaacattctcactatgtgtcttttctcgatgttctgatgccgctaaatcattaatctcttttattttctgattcttttctgctacttttattttctcatcttcatatttttgatttaataactctagccttttattttcctcttcactcgtaagaacatatgaatcagcaaacaattttctcaatagttggatttgtgaaaggtgaaggcgacaatgtaattaccatcgaaagtatcaacaggggacttccgtatattgttgataatgatgcatttcaacgatggaacgaacgtggtaagcataagtttggtttttatacgccagaaacagaagagttaaatatgacgccacaacgtttaatgacgttaatggaaatagaattaaaaaagcgtgtcaattcttccgtttcgtatgaagtagaggcacaatcgattggacgtattttcggactagcacatgaactcattaacgagggcgatacgatccgaattaaagatacgggcttcacacctaagttatacctggaagcacgtgtaattgccggtgatgaatcttttacggatcctacacaagataaatatgtgtttggtgattatcgtgaaattactgatccgaacgaggaattacgaaaaatttacaatcgaatccttagtaaattcggcgagaaacaagaaatgctggatcagctagataaattggtgaaagaagcgaatgaaacagcaagtaacgctaagaaagaatcagaagcagcgaaaacacttgctgaaaaggtacaagagaatattaaaaacaatactgttgaaattatagaagctaagaatatccaattcgaacagtttcccaattaacaagagaaatttatacaaacccagtattagaaaattttgatggtagttttcgaggctcggctcagggcatagaaggaagtattaggagtccacatttgatggatatacttaacagtataaccatctatacggatgctcatagaggagaatattattggtcagggcatcaaataatggcttctcctgtagggttttcggggccagaattcacttttccgctatatggaactatgggaaatgcagctccacaacaacgtattgttgctcaactaggtcagggcgtgtatagaacattatcgtccactttatatagaagaccttttaatatagggataaataatcaacaactatctgttcttgacgggacagaatttgcttatggaacctcctcaaatttgccatccgctgtatacagaaaaagcggaacggtagattcgctggatgaaataccgccacagaataacaacgtgccacctaggcaaggatttagtcatcgattaagccatgtttcaatgtttcgttcaggctttagtaatagtagtgtaagtataataagagctcctatgttctcttggatacatcgtagtgctgaatttaataatataattgcaacactctcacttcacgtctaaacgcttatagagaaacgtgtcgcgcctgaagcctgcatcgggtcatttcctgctccacctgattcctgcatcatttgggcagccaaaataccaacatattgagcaacaccatgtttttctgccatttctttaatctttggaagatatcctgtaacttttgcattaagattgacaggctccccgccaggactcacattacctacacacataccaccaacaaaattactagaaggtgctagatgtccatacataccttctaacatcccggcttctaatatctcacgcgcacgttctttttgacttttactaaactttgcgagttccatagctttctctagtccatgagaagatgttgtcacttttttgcttccacttgcattaatctcatctatttttttcttaaaatctgtatctcctactatcttttttacatctggtccggagtaactttcagattttgttttttgcatctcttttttctttttttcacaaggaccattcggtcccgcctcacatacctctttttctgtatattcttcatattggatatccaataaatatgatatagcatcatgcggatctttaccagttaaatcattatcatatcgtggatggtgatgggggaacttccggagcaggaaggtaaaccagcaggcaaatgcagagaaatcaggaacagcctgggggatgtatggcgtataaatacaaagcaacgatgtactattctgatgaggagactgaagcgtttcttcgtgacaaagctgtgaagtcgaatgggaaaaaaagtacgtctcattatctttactctctggtcacaaaagagagagaaaatctgatggctaataatgacatcaaaaataaacccgttccggttcagctttttcccgaatatgttaattcaaaagaatttagtgtgaatggttcggttgagtttttcgggctgtctgatgtatttcaccctcataaaggagaaagttctctgatacggaaaaaccataaagctttgatggaaacaattgacgataaaattcttgaacacgttgctaatcattttagcaaccatggtcacgaagttaacgataagtcgtttcggattgtgctgaagacatatgtggcgtgttattactgtaatatcagtactatcccaggattgtactccggaacgtttactgctacgtgcaggatgatcactgtcagtaggaatgaatgggacaaatatggcgggggggtgggaaagcattgatggaataaaattgctgtctaaaggcgaatttaaagataaacaaaaagatcatctgcttagcatcctatatattaatgtcattacagccctggaaacactttatgttgagttatttattaactctatagataaaaacgactcatatcttgctgactttatagaaaaaggtaagacggaatttaaggtaaataaagaaatattggctttgccattcaaaggagaaactattgaaaacatgagggcgcaattaattaaggtaattaaagagggtaattcggtagtgatcactgaacaggatttagaaatgttgctggatcacgcacaatctcttggagaaaaattgtttgatagccttgaggtggcattacagaaaaaagatgagagtgaattttgagtctcggggtaggttgatagtgctaccgataacgagcaagcaaatgatactcggcaggcagtgcctgccggaggattactttttacttccaaattgaatgccgagaagtttattctctgctttatcgccacgtagagtaagaacaatttttgatttcagttctaacatttcgatttcagataaagttgtttccatagcattaaagttttcagtgtttcgataatctccactccttcttgtttatacgatttatttgtaaaccaatctaacgatttgcttccaattaattcatttaaatcacactttccaataccaggtacattacctgtttcagtgtattgccatatatcgcatggataatccggtttcttccctccataacgtggaatccacacaaagtcagctttcacattcgccataccaaatggaaaatacatatgatggccaacatataaaccaactttttgagcacctaatcggcgtagttcatcgataaaagcttgtgttcctgctctcatatcatccattgtttttacttctacatcagcaacccagaccgttgcgctcttgtctccgcggttccaaaagtctcgagcttctatacgtgcatcattttcagaaacaaaacgacaaaacgcatagttaccaaaaggaattttatgctgcttcatagcttgtacatatcctttatatagaggatctacataatttgaaccatcttgtacacgagcgatgataaaatcaatgtattgttttgccacgggccaattaatatctccattccattttgaaatatctacagtgtaacccattatttatcctctccttcgctcaagggctgcgacaggcagggcaaacttcagcgctttgagtaacgcgactttgctgaattttttctttgcaggggtcgcggatacagcgttaataacagacacatcagtcatattcattaatcctttaattacaccggatagatttattgaaataaaaatcctaaaaaactagttttgtgacttgggttcaagattgtttgggatcacctccgccatttcagagttatagaaatcagggaatttttccaggtggtcacgtaaccgaatcagcgcttcagctgatttagaacgaccacttctgtccttcgccttcaaaataagaagatcggtttgtgggtcaaggtagatcgacatagttaccgttgggccacgaagcctgtgacgtctaatcatgttttccctctcaacatattcctgcgtcaggatagtgacacattgaatacaatttattcaatacgcgaaaaattccactatattttttacataaatttaacattcaaaactttaaggacaatcattctcacctttctgtatacgtccattctcatgcagtagaatctgaagtcatcataatcagtaaaatattttgcaagttcattcttcacactagatgacgaactgaaaacgaaaaaactttgctcgcatatttaattcatagatatttcatatcgttaaaaagttgcaccgtttcaaacgagttgtgtgataaaaagatgtttagattatgtttgaaattgttgtttctgtgaattttttatttcgcgatttctgtatatttttaatcctttttactcttaaaatctttttgcttttgtgcgcaaatgaaaaaatcaaaaagtcacgcgtaacttttattaaatatataaatatattattaaaatacctaacccttttatgatgaaaaaatataaatagttaaagaaaaaagactgataaaaaatatcagtcttttttctttagttttatttataaagagtatctctttatggtgttttctactttttctctccagttctctatatcgtcaattgatattccgatctttattaattcgtttggaatgaaactgttatctaaaatccataaagtgagcctttctaatgtgattctttcgtttccaatcgaataaatacgttcactttgtttgcaggtatatggttttttaccaacatatttttctacataaaagtatctttttccgtttgctttgtaatttgttaggtattcgtacagctatcaatggaattattcgtatcataaataaatttatagatggttttaatacaccagcagaattattaaacaatataccaggagttagcgcgccgactattccacatgtaccaatgctcgctaaaggcgggaagcctgtaggagatggctcatttattactggagaaaaaggacccgaactgtttactaaaagagggaattctatcacagttacgccgttatcttcaaaagaaagatcactcggtatcactggaactatgaatcaactaatgagtgatatgagccggatgatggctagttcaatgagtcaattatcagggttaaagagtgttatgagtggtgtgtatggaaatatgtcaaatagtagacaagctatggcagctggtgttgcgaatcaagtgattaattattcttcaggatcatctggcggtggagtcattccaacgcttggtggcgatttagttgtggaggttcctgttgttttagagggacgagatgtagcgcgtggtacgtatcgctatacaaccgaatatcaagaaagagaaacacagagggattcagacttttaagtttgagtctcttttaatttgaaaagaaaagatggtggagctatgcgggatcgaaccgcagacctcctgcgtgcaaggcaggcgctctcccagctgagctatagccccatcgtagtcacctctgtaccggtaatttttgttgaggcaaggcgtggtgacacgaagcatactcaggtatgtgagtgtcgccgcaacgcagcatcagcaaaaatttggtaggcctgagtggacttgaaccaccgacctcacccttatcaggggtgcgctctaaccacctgagctacaagcctgtagaggttttttactgctgtttttcatcagacaatctgtgtggacactacaaaggcaggttctttaaggtaaggaggtgatccaaccgcaggttcccctacggttaccttgttacgacttcaccccagtcatgaatcacaaagtggtaagcgccctcccgaaggttaagctacctacttcttttgcaacccactcccatggtgtgacgggcggtgtgtacaaggcccgggaacgtattcaccgtggcattctgatccacgattactagcgattccgacttcatggagtcgagttgcagactccaatccggactacgacgcactttatgaggtccgctgtgtaaatttaattccagaaatgattcaaatgatggatacgcttggatacacttctaaaattgtgtctcgtggagatcgtcaagggcttgtatattttgaaacggattatcgtcaaggaaatgaattagataaagtaactgcgtggttagatgcaaaaggccttaagtatttttatacaaaagaatagttttacgaacagaaataagagccgtcctgtcgggcggctcttatttaatttatattcactaattcatcaaacttaaattctgtgttgagaccaaatgcatccgtacaatatacgatttttaacattggttcgatgtgtagcacatttatgtacatgtcctgtatcatgccatcgcgatagtaagaaattgatatttcttcatgagtttgcatggatcgaataagactatgttgaatttgctctttcatatcttcagaaactattggtttcggtactttatttaagtcattaagtatttctctaattcctgcaaactgttccggcatactggcaaatggttgccacttcaccattttatcaagactttttttcgattattgtagcgatattaatgcctctaccgttcaacatataaatcccgaaggagatggcaacagttacaatcgtttttttaaagtgaaatttagagtctgctatcattttgcttttccataacttctatcttaacaatatgcttaccattacggtatgtttttacgttatcagtgggagacttaactgcgttacggatctcatttattatatgtttagataacaaatcgcagccctccatatacataaccttacgggtatcagtatctgatatattagtgaagcagctacttatccatgaatcaggtatttcgactccatgtatcagattcatatattcaacgataaacttatctgtcaggtgaaaatgtccaaccacgtattttccattataggtttgacgagaagacgaagttatccagtcattttttaaaaccaatgtcagtgctttatttttcattttcagattccagttcacgaatacgattgttcgtcatgttgataaggcatttctgctcgttattgcagtcggatttttgttttatccattctctttgagaagggagtaagcgttttcgtgtttcagggctaaggtttttccagaccaaattgaccgtgttatctatgttgaccggcgactgatacattccgcttttacacgtcttgtacgcctcgtccagttcgccccagtgttccggtgcgccttctccttgatagctccagtgtgatgcgtaagccgtagccgaaatcatgctcagcgccagcagcgctgccttgcctgaaatgtgtttcatcatattcttcctgtgaattttattatccaaatcaataattaacattgtgatttgtggggttattttatcgaagaaaggaagaaggcgggagaaaaaaccgaagggaaaaggcgtggtcagacgaccacgccaaacgcttattttttacgaccggtgatgcgacaccactcttctttctcgaccaccgggtcgagcgcaaagagaccggcgtaggcttcacagacgctgtctgcctggctggcaaggataccggacaggcccagcagaccgccttcaaccggcagcacgctgattaacggcgccagctcgcgtaatgggccagccaggatattcgcgaccaccacatcggctttcatcgcctctggctgtgcatcgggcagatacagttcaaggcgatggtggaggatgacgggatcgaaccgccgaccccctgcttgtaaggcaggtgctctcccagctgagctaatcctccaaaagtggtgacccgtacgggattcgaacccgtgttaccgccgtgaaagggcggtgtcttaaccacttgaccaacgggccaaatactataaatcctatggcggagagcaagggattcgaacccttgatacgcttgtgacgtatacacgatttccaatcgtgctccttcggccaactcggacagctctccaatggctccgcaggtaggaatcgaacctacgaccgatcggttaacagccgatagctctaccgctgagctactgcggaataatattgcctggcaacgtcctactctcacagggacaaggtcccaactaccatcggcgctagagagcttaacttccgtgttcggtatgggaacgggtgtgacctctctgccatcattaccagacttttatcattataaacatttctttcgaaatgtcaagaagaaattttaatgcatattccttcaaaactagataacattgctacatattatatggttaagtcctcgattttgatgattcatctaattttgctaaacaaagccaaccgacagaaaagaagaaaaaataagaacgggtgctctcttgataaaggggctcctgttaaaagtgtattgaagttttagaacaacatatcgatgaattaacccaatagccataaatacaaggttttaatttttacgaatggcaccgaatttaatattattgtcccgcttttttatacatagtgacgcgttaaatccatttgaaatgctcctttatggcgctgggcgtgacttcaattgaaattttttaaacctaatgggacttacgattaagagggcgaggattaaagtaatctatgcattgctatatgaaaacaatcctataccagcaaatgataatcctgcagctgaaataggtaatgctttaaaatatccaatagttggttgaatactaaatttagctaatcttaaagcacccattgttgggaaaaggataaatgccaaagaagttaaaatagaaggtgctgccattgtatgaaataaaagcgcaggagcgacgccgaaactaacaatatcagctaaggaatgggcataagcaaaaagagtttaaagcatcattaacggaggcagatctaactgactttttccctaaaggaagcaacccggacagaggcgttagtttaaatatttttgatcactttatgacctcctacatgccctatatgtataacaaggtgttagagttaattgataacgccggtatagtagaaaaacgcacatttactgagcatatgtataacgttgattcattcagggagcagatggcagaaaataaaaatgatataccgattgatgaattatccagaaatgaaatgttccttaatatcgaaagcttgttgggagtgtcgctgactccaacattatctatgccgtctggcaatgatacgcttttgcggtttgctcaatatggagaagaggtaatggaaaatgtataatcaatcaaatatcattctgcttttcctggtgttgttttcctctgcaggatgcagcgttagccagaccgttaacaagacgttatctccaccggcggatacaaagtgggttaattttgaagtaaaaaacccatctcagtatacgaaaccgataacgaaaacgcaagttttctggctcagatttagctacgatttgtatttggattagtcaacgagtggcaagtgatcccttagtacgattatgtagtagacttcatgcagccaccggtactctccttagccctgagggcttaaataagcgttttaacgcaaaagcagtgctgtttttaaaacatatcttttctttattgttacagcaaaaaatctgtgaacaaacacaaatctctaaccaactttttgcttattttgagcgtattcgcatcatggatgctaccgtatttcaagtacccaatactttagaacatatatatccgggttcaggaggttgtgctcaatacaaattgatgtgaaacagattttgaaacaactacagcctggagaaacatttgaattaaaacatgcgtatattggcgataaacaacaactgtttgcacgcgttatttttaatcgattaacagataagcaacttcaaaaacgacgagcgaagatcgcggaaaaagaaaaatctaaaaatagaacgtactcagagaaaagtaaaatgatagcggtaaaaaggttcgtggttggtatcgaatataaaaaaatagaatttttatacaaaaagcacccaaaagggtgccttttgtacctcttaaaatgacttaagatgcgtttacttgagttcattaggtagttagaggttgatagactatctttaatgaaaatgttgagcaattccattttattataaataaatatataaaaatgaaatatgtaattttgcatcattaattcttttctgatcctatatccaagaaaagtttacaattctcatatacattgcttatggtgcagaatcagatgcaaataaacgatttgttcctgcagaattatgtgaaacgagagattgcgagaagttcaaacgtagctatgataaatacgttgagtcattagctaaaatccctagtgatcgtggattaccagtaaaagtattatggattctatactatgtaacagcaaatgaagcttatgtgtttgtgaagtaaaaaacaagagccgtccttcatctgaagtgacccccgaaagttagacaggtcgtttcattaggcagcctctagggtataaaacgactgtcccaaggaagtactcagcatggctgaagctctcgttctcgtactgaatgtttctcctaatatcatcccagaactcatcaagctgaagtttttcccagctgaagtcccgctgatttcgggggataacgtaacgtctgttaactgaaagaatatcgtttatatcaacctgtacggcatcaaagttcatgctccctcacttgtgttatgtattagcatattgtgcaggtctaccatacattaatactctaaacttacgaatgttctatctgagttttgctcaaagctccacaaccattaagattgttgctaaaatagcaataatcccctcatcgcaacaatccgctgtttttagtgaatctccagcaacaaaccttgttttctccaccgcagatccgaaaaaagcatatttcggatcaatacagcccgttttacacctgcataataagtcgggttagggattcaacccatgttctcgatggcttgctgtatcacgaaagcgacctggaaatcagggagcattacaccgatacagctggtttcaccaagaagacatcacaatctaaaagtaagacttgaaatcccccatgaaacatggcgaaataaattacttgccctgaatgttttagaaatgaagtatgtgaatgggaaagaaacttggaaaccaaagcatagaccggaaatggcacacctagatgatttggaaatactacataattatgtattacagatcagagggatgtacaactactacaaatatgcagttaattcaacggtactccaaaaattcagttacgttctagaatacagcatgtataaaacattcgccaataaatataaaagctcaatcggaaaaattaaggggaaatattgcaaaaacggtgtattcatagtcaattacaaagataaaaaaggcaaacaacactctcattctttctacagggaaggatttagaacggttgatataactaagatgaaaacacaagaaaataacatcgacaacttgttagcctcaagagttcatatgtcaacaactagtcttatggataggttgtcagccaacaaatgtgaacattgtggtaaaaccgattctaacttcatcaacaatttgcgaggacattatgcaaggctctacaaacctcgtaagatcaataacaataatttgcgaggacgttatacaaagctctacaatcttccctaaaaaaaataaaaaggtccataatggacctaataacaaacaacaatctattttcattcatattcactcaaaaaatgctccaatgccaattctaataggtcggacttgtcaaaacgctctctttctgacagtttatcgagacgtttcgcaacttctttgctcaaaataaccgtttttcgcgtcctatcgtcccttctaagagtttttatttctgtcaaaacttcagatactttcactgtattaccatgtttcactcctaattcacctttagtctcgcttttaataccttgtattatcttaggtaaatcattaacaccacttttactatttcgcttcaccatatccataatattttcttctaatggctctgggttatctttgtcattgtagaaccattctttagtgctactatcaaaagcataccccaaagccttcagctttctttgtaaagcccctccggacaatcaacgtccgcgacgaatatgaactgctgaagcatttaagggagatgactgccgacaacgaagactatacgctgattttcttcggaacccatctgggaagcgagctacgtgagatgagctaccacgcagaaaggtttgcggaactggggatcatactggatatgaagagtgatctcgatggccttatgccagtcaggatcaataactgtggaatctatcaggtatgggataatgatggaggattttactccctgcttgtccggaacaatgtctttggatcccttcacatgctgagcgatcccgacggacagcctttcagtacttcgtggcatgcaagtgatgaagaccctctgtcgggctgggtgactaccagctggaaacaggaactcgggattagtggttccgtcgtggcaagatttaatcactcctgaccagtctggctgaacggcgcgagaatgccgttcagctattattgttgctgtaaagttaattattatccgctaattttactatttaaacaaatatctgatatccatctggtctattgtctagttcaaaaaacgtaatacgcggaaactcttcagcgtttttggctttacgataatacacacgttttccacctaataaggaaacaagctcctgattattttcaagagcttgcacgatttcagggcgtaaatttatcatacatttagcctcatctcgttctttaagatgtctgtcatagcacgtaccgcatccgctttagaagcgttaaaacctggttctataaatggatgtgctggcattttagaagtaccccactctaaaaactttccatagaaatatggagaacggtccgctttgtctattccaatcttgatcgtcttcacaccattttccattcgtgccttcgtaactcgtatattatcaagcaaatgttggcctgtacgccaaggttcacttttagacggtttcttaggacttgaactcctcggttcacttctttctgcaatggcttttcgaatttgctcaccaccagctgcaagggctttatcttcaatcttttctccacgtaaacccatttgctctaattttgtatgcgaattgaaggataacaaagttattacacaagtgaaacgagtgattaaagatacatttaacaataaagtggaattatggggatcgtggggatgcgaaggaacaatacatggtgattggggctacaatcatgcgaataaatgtagatatgccacagttgaggaaatcaacgcagaaagtgtaagacgtgtatttgctcaaaaaggacgtaagccgaacgagtatcgttctggtgatattgtaactgatgatgtgtatgcatatcgtgtgttacatgtaatagaagatagagcaactgtagaactcatgaattcaaatcaaatgtatgaagttgcaacagctaatttagaaatccttttctttgatgaggatatggctggataaagcaattgcataaatagtttgctcaatctcaaataaaggataaggggatacatttaaaatgcgatatgcaagaggcactcaatatggtttatatgcatgtaagggtaacaataaagattacaaatggtttaaaaaagctaggaaaggtatgggaactaatttcatttatataccagcccttataatttataagactgattatatcagaggtgaaataaaaaggaaaaccttttggctacgccaaaccgaaattcatctcccacctatcgttgggctacgcccttcacacgcttgaggaaggagaattctttcgggaagttcgttaaaataaaggaaaatgctatttaacagtaaaaatgtagtaaaaactcttctataggcaagaagagtttttttagtctatagtgttctgtagggattagtatttttatcattaaaaacaataaataaatatatataaatataatgtatatgtgttattatgattacgttggaaaataaagtatattttgattcgtaaaaataattaggagaagaaggggaaatagcatgaaaatgaaaaaaatgattttaacaggtgtagtacttgcagcaacaactttaacatctttatcaaatgtacaggcagatacaacatttaaagatgttccagcaaatcactggtctacaaaagcaatttatgatttaacaaatcgtaaattaatcaaagattttttggtaagagaaaagatgaataatggtctgtcatatgaccccccctgttgctctatttaaagggtgtgtgatgcaagatcttcacagtaaagactcagtaatcaatcattatgccgatcgttatcaatgttatatgccaattgatgtccgtaatggattaagaagcaatagtatagatgcgtcgaattcatctctcccatgggatgtaacattacctttagtcacgactgaagatgtttcacgtgataaagcgcttggggcgtttgtgggattggctgttggggacgccgtcggcaccactcttgagtttaagaaaagagacagtgaacatgtagcagatatgattggtgggggaccttttcaattaaaacctggtgaatggacagatgatacgtccatggcattatgtctggcagagacttatctttcagaaaacagaatgcacaccgatgtgcttagaaaatatctcctgaaatggtatcttgacggagagaatagcagtaatggtcggtgcttcgatatcggtcggtttcagcagtaacgtgtcgcggacaatatccgaagaagaacagatgactgtcacattatatcgccatggctgagagggattccaccgctctgtgacacaacacattcagaaattcggtacattcatacacgtcaacgcgataatatgactggccgatcagcttttctaccagaccgagtcctttatccatcagtgacccgttaattgcatttgtcctcctgcctgccaattcaatatctgcacaatgttccttgatcaggaaaaccatatttattcaaatttaatattgagtttcttctgtgacttcaaggctggttcccattgaattttcattaaaagaaaaagtcacactctcattatctctgaccactgatatttttaacgaattactctcctgccatgcataactaacctttgcatcattgaatttatcgactttatttgtactgggtagttgctttttgaatagcgtattatcatattgaatccttctgaattcctcataagcatcccttaatttcaaatcagtaatcaatccctttcttttaaggtgaaagcagaacaccatttcttcatatttaagctgattggggtagatggtataaaggctccgatatgggcgagtaaagatggaatgggacaagtgtattttaaatgataaaaattctaagattttcactataaaaaactatgctgaaaagtatagtttttttgctagaaaaatatatttaaaaataaatatataaaaatactttacaagcctatttttatatggtaatattttccatatagaacggcggttataaaaaaacgctaattaattaatttatatgttaaagtatctggattttatgtttaatttaggtacaataaaagaatctatgaaaaaactaatatatttggaggaacaaacaatggcaaacaaatttttaaaaacagcaacagcattaacaattatgggaacatctttattaggagcaggagcatttacagcgaaagctgctgataacacagactcattaaaattcaatgatgttccagcaaatcactggtctaaaacaaataaaataattgtcccatagcaagataaaaggcatattcaaaaacatcaatgtgaatataaatggttatagaaagaaaatagagtattaagtaattgacaatgatcaaacctatagcaacaaatataaaatgaaaatattttttccagataaatattttctcatcattgttgatattacttttgagaaatattgaatcgtacaatgttatcaacattgttacaatgccgaatacattttgagtaattcttaactttactaattcattttttgtttgcttttgaagaaaaacggaaccactattaaaaaagggagaaattttgctaggcaatagaaataaacatagctagtagaatcgaaagtgattattttaaaccatgccaaaagcatcattactgtaaatatcgtggctgttgagatcattgcgcaaccagatatcaatgacttatcagtataatagcaataacgtttaaaaaattcagagacaatacctataacaaaaagtgacaggagcaggggaaaaggtggagattgcctcaaaaccttacctattgctatataataccattcgtgaaaaaacgggtttccaaggggaaccggccgtttataaatctggaaaatatcgtggaaaaccaatgcattatgaccgggaagaagaatatgtaaaaggtttgcgtaacatcttaaaagatttagcctcaaatgttttaatacgacgtgttttatttggaaaatcagattttgattttgatgttcacctagagcaaggtggtattttactagtaaatacagccaaaggagaacttgcagatctttctaatgtactaggaaaattcgtattactaagtatgcaaaatgctgtattccgaagagaaccaaatatttcaccataccatcatattattgtggatgaattccctgattatggtacgccaagttctcctataaacgtagcggcgtgaaatggagaggctgactcttacacagcctaactatttgttcgaattttatgggtgaaactcccagagcaggggaaaaggtggagattgcctcaaaaccttacctattgctatataatactattcgtgaaaagatggattttcaaggggaaccagcagtttataaatcaggaaaataccgcggacaaccgatgcattatgacagagaagaagaatatgtaaaaggtttacgcaacatcttaaaagatttagcttcaaacgttttaatacgtcgtgttttgtttggaaaatctgattttgatttcgatacacatttggaacaaggtggtattttacttgtgaatactgcgaaaggggaattagcagacctttcaaacgtattaggaaaatttgtattgctgagtatgcagaatgcggtattccgtagggaaccaaacgtctcgccttaccatcacattattgtggatgagttcccggattatggtacgccaagttctcctataaacgtagcggcgtgaaatggaggggctgactcttacacagcctaactatttgttcgaattttatgggtgaaactcccaacctgactgagccagccctgttaaccacttcagcccccgcatcaccgcctccataacctgaatctgaattgacgctacgctatggaggccattgttttttgcaaggcaaaagcctgagtggctgattaaacaaaatgagcttgcattaatccttcagggccggttcacagttttcgcgtgaaccgaattcatctgcatgttttcttatgcgccatcagaaatctgactggagcgacaggaatgcaaagagtagtggtctgtggaattctcctttgctggggcctgataagttacgggctcagcactctcattacggagtatcaggacgggacagtattggtctgggggcttattatgatgtcccctttttctttacgcatcgtgaaccggatacattgccgactcgtcaaccgcccctgtattctgagtcaccacaggcgtaaatccagaatctttgttcatctgtcaccgaaccagccaaccgtcagtatttcatccggacgtgtggcctgaccgaaatatagaccaggatgctatagaggcacgtcttagcaacgtatcgcgcctattcagggcgtttccggacgaagaaaaaaataccgatcaggatagctataactctttgtatttttcggggcttggcacaccattcaatgaagaactctctgagaaactgcataccattatggacagtgcacaaagctctgcattgaatgatttaaaagatcagccaaaagaaattgcgaaggatgctggcctggattatttgaaaagtggtaactggtgggaggttttaaaggactcagggaaaaaactgataagcccttcggagtggaaatcactggtgggggatgtagccaaaaacgccgcaaagaaatcaggtatcgaggcaaccccctggttgcgtgataatcccgtcattgcagatatgttagttaccggtgtcgatacgcgaataaattcggcaaaattacgttttgagcgtttctttgaaagaaccaaaaccaaaatgtccatctgctgtacgttatgccaaagttctcggcggaactgacccgcggttttattgcagacgcgagaaagatggatgaatatatgattaataatgctaaagaaaaactggctgcgctggtaaaaaaaatcaacctgccggaagcaaatgtccatctgcatgttcgcagcgggaatatacgtgatgaggtaatcaaactggcggatgaacttaacgtcggtgcgattattgtgggatcgcgtaatcccaatattcaaacccatttattagggtcagaggcggcgagtatcgttcgttatgcgcatgttcctgttttcgttattcgttaatgacatgaaagcaaggtgatttctgaaaagaacccgaggaaggaacgatgataacagaaaagcctcaccgcccgtattatcaacagaccgttgatgaaaccctgacaaatatccaatccagcctcgacggcctcagcagtacagaagcgaccgcccgtattgtaaatgctacagttagacggaacccttctggtagatattttgtgtcactattagttgaaacagaagtacaagaacttccgaaaacacattcttacattggaatagatgtaggactaaaagatttcgctattttgtcagatggaacacactatgaaaatccgaagtttttccgatcattagaagataagttggcgaaagcacagcgtgttctttctagaagaatgaaaggatcttctcgctggaataaacaacgagtaaaggtagctagaattcatgaatacatatcaaatgctagaaaagattacttggacaaaatttcaactgaaatcatcaaaaaccacgatgttatcggtatagaggatttgcaagtatcgaatatgttaaagaatcataagttagcaaaagcaattagtgaggtatcttggtcgcaatttcgatccatgttagaatacaaagcaaaatggtatggcaaacaagtctgcttcaatatgacaaacctggcccacaaaattgccggagggatctatcattgactgaccgcatccagggaagcaacataaattaccagatagagaaaacaatctccttagaacttccggaagtggttttaatctttttacttcttctttcatacgaataactcctaaaaaggcctctcaaatggcctaacagtttatcgatcaaattctgctctaggccacatatagttaataataacaaaaagaactggacagaattacctgagtgtccaatgacgcgcgagaattaaacgggaagcgtaaaaaggccactttgcgaccttaatcttcttattcacgcattataatgactcataacttggttcgctattcccgtatagcctggataaatacgagattcaccatagccatgctgaacaagtttttcctttaaatgtttcgcttcagaacaaggaagtgtgattttaataaatatctttccagaacatgaatatatccgtcgccggctgttgttttcagactgtacaggacgtcgctgaaatattgtcggagatcgtcttcaacgaaggagccggattccagctttagtgtattgagatcgcagacagcacgcaatttagccggcagatgtaactccataaaatcacgggcaatgtccggctgagtcagaaactgccggaaggtggcgtcgtggggcgtgggtgtagtctttttctttttcatcagtccgagttctgaaaaatgatcgggtcatagtaccacaggccgcctgtgctcacattgacgcgtagtgcaattgcgattcctatcccttcagggactgcgtcggtagttgtgtccctgcccttctttcctgtcatccttcctttgataaaaactgcactccaccccagcttaaggctgatgacatttaagtcgacatgtaactaatggcatcatatatcgggtcacaataacattgcttttatctaattcgttaaaaaataaagactaatttattaagccgcgtttcccatcaatttggtcgtaacccgcgtattctctcgcttatcgcgtgttttctaactctaatgcacaaggttatccacaggaatagtggataactgcctccagcccgtacagcatgcacttcagcaaattcccggtttttcccacgaagcggcagtaaaaaatttttatcactcttttttgcctggaaaacgttcattttttcataagcaactggcgagatcttaatcacaattctgtcatttctcctgcaccacgattcgacatacgcggcaccgggaatgtgcatttcgtataaacgtacagcttttgatagtgagttattcctaaaaatggcctttttttaatcattatgaagttcctggcaggcgtgttgcagacatcactctgtgcatcacccccacacatttttaaggagagaaagatttaatcagcggttgtttaaacagtttactgacatcctcaacttgtttaccccacactgatttcatttctttaatcatttgccacaacgaatcttgattcattttattatgccctgcataggtaaatattgaaaatagtggaagaacaatgaggaatgtagctttaatcatcctactttccatagaatcctccatagtaatcattataatttagattagtccctgaggctatttcgcctttaccatacacttttcctattgctttggctgcatcaatgcgagataactcaccacttaccattttatcataggcagaattatatgcttttaggttttcggcacttcccgctatatcaatatcaataccgccgtttgcaaggatctcgcgttgtattttaatgttattcagcgttgctccaccttcatccataagctggctgttgatgaagctttccttactcgaagaatctaccttgctatatcagccaacataggttttgctccaggttttgctccaggttttgaacacaacttcattagtgcatgggtagcgagtttatcttacacatttcaactatattttgattttagcggctactgtgatatggctgtaggagctgcacttttgtttaatatatggctgcctataaactttaactctccatataaagctcttgatatacaggatttttggagacgttggcatattaccttggggcgttacctgagagattatctctatatacccttgggcggcaatagatgtcccactttcagggtttacatcaatcttttcataacatttgttttgggggggttatggcatggtgcgagttggatgtttatcatttggggggccttacatgggctcgccttggcgattcatagagcctggaaaacattaggcatgagcatgcctaatcctcttgcatggatagttacattcttcttctcggataattttggtgcattcaacatagtcagagtaagcatcgcaatatgttgctaatgcattcacatctatgttcgtgattacgtctagctccaataattcaccagcaattctcctaaactctttctttgcaactgaatctaaccacgttggtggctttaccttgtccttttttgcttgcaactgtttttcagcttttaatcgttgttcaatttcatcttttgtcaatcgatttgtattaccttctaacaaatgcaaatgaatcggcttcgctttccttcctatgtgaaccacctcccttggctgaacccccttttatggaataaaacgaactttttacacggaaagctaggcggcggtctccaggaattcgccttttgctttttcatggtggggggatgtttataaattttttctttcgaattattttttgtttttcttctcatcttcttttgttttcttgttttaccatcgttccaaaattttgttcagcttgccaatagaggtcattcatggcaatctttgaaagaactttgctattttcatcgagtatcgctatctcaactcgtcccatttcattaatgtttttactcttacatgtaacatgggcttgcataataaaatcttctactggtccaccagggatgctctttttaacagctgccccatgccatccattacctgagccatagtccgaacaatagaattggtaactatctgttttcatttcaccaaccggattaccatcttccatagaactaaccttactccaccctacagttgtggacatatcatcccatataagacgttgatttctttctacaggcaattgctccatttttaatggcagtccaatacgaaaataatctggttcctttgcatatttatcttcaaaccatacatctaaaaaagtatgtggctttttaatatcaatttaaaatagccagtaacgtgctcactgccaaaggaattcctgtcatatggacgcccacaggaacgccgaaccgatcttttaactgttcttttaatgtttcaagctggttgagatcatcggtcgccattttacttttaaccaaagcacttaatgcaaggctatctttaatgtatttcatcatggacgggtcaataacttcctgtaaatgaaaaagactgaattaaaccaaaaatgtatttacccgtttgtgcaacattctgtggatttctgatatttcctgagatggcacttccaacgaaggcagaagaatttgaaatggtattcagcaactcacgctgtaagagcaactgcaacgcttctgacggataacgtttgggatacacgcctgccttcattgctgcttttacacctgaattcgagatgccgggattgcggatacgaataatctcctctgttaatcgcgtacattaaggcgcgaccccaaaggaactacaggcaagttctcgatagtgcgataagcaataaccccaattcctacaaaatcggtagacctctgtgctactagtctagttagaagttgatgaagccataacttgtttataagtctaccctcgccagttaagcattaacatgtgtgcaagatcctaccatcaaacaatttttgcatgaaagggatttattcacataaaggtctttgaaactaatttttttcaataaaaaaatgtaagcatattgctcataggatcctcttaggcatgataatagtgcctgattgcgaaagaagttttgggaatatacaaaacacagatttgcgtcgttttagtgacatccttgatgtttcctcgatgtgagctagaccctttccaggctgatcatggcaaagcaatatacgaaatacttcacccattgtgataaaaattcctaaccttacattcccatctcctgaaaaataatagataaatttcggatgtctttacgtgttaaatcaatcaaatttttattttcgaagtgctgatgtattagaaataaaataattcgcaaatcccaattgtattgctgtaaagtgcttgccgctttcccttgtgctttcttttcaatgagaaaatctttaactagatttttattttcttggctaacatgcttttcataaattgcttggtctactattcgtttcacactgatcatctcctcaaaagtaaaaagagaagtgaaatcactcctcttgattgatgaattgaatcaaagccctatcttgtacaaaataaaaacagcttatggctgctttggttcctcatttattaattgttgtactaatacctttaattcataaatttcagctttcattgaaactttctcaagtttttctgcttcaagttgttctttaagagtaaaattctaatttaaatcctgattctgtaacaatatccaccatgtatgtatctatgagtggctcgtaaataaaatcatgatctattgtgatttgttcagtcatttgattcaccttctatcggtgaaagcgtaataatcatttgttgatctaacacattccctattacagcattcatccatagattaggattcatttttctcattaaaaattcgatgactgtgattaactcttcagtagataaggaaacaaattctcctaaaggttcttgattaaacttaccaccacgtttttcaatcgttagagctactccgttgtcaatcacgtatctttttgcagtaactaaatcgaattgacggactttctcgcggccgaatccttttattagttcctttagaacatcatgaatgacacgaaaatctaacacttttactttctgttcaagctgctctctacccaatgagattggtgcaacgttaggtattacgaacgaggaagcattggggctagttaatacattattaaaaacaggatttccaccagaacaattagatattatcgctgaatatggggatcaaatgattcaagctggattttcggctaaagaagtccaaggaattatgtcagcaggagtagatactaagagttggaatatcgataacctattagacggtgttaaagaaggacgtatcaaaatggctgagtttggtgcaggtgtagataaatctatgcaagcggttttagataaaacaaaaatttcggcggatcagtttgaaaaatggggtcaagctatcgctcaaggtggcgaaggtggacaaaaagcgatgcttgaagccaccaaagctttagccggtgttgaaaatgcaacagacagaaatgcacttggcacgaagatgttcggtactctaattttgaaaaattactgcgctgggtttatgacaaaccgctttttgtgcgacccgaattagggaccaaaccggcgtttctgaatgatactgaatccattactatggcgacaacggcggctgcaaggcgcacactctctgcattgaaagaacacaaaccttttgctccgggggctctggatgaatacttaacactgtttggtgaaaaactcgagcttttcagagttgtcactgaaggtgatgatttcgacgatcaaatagtggcaagtattgaacaatttgctccttaccgtaatgaaattgtatctatattcacagcggttatacaatattcgcctacggaagaatatatcacaaaaattcaccgtttttttgaaaaacagttcccttatatgtatcgtcctgaaaacgcaatccaatatcgggctgtggattttgataattttaaaacagctctaccgatcggagtaacgggaataacaggagcaacaggaccaaccggactaacaggaccaacgggagatacgggagatacgggaccaaccggactaacaggaccaaccggagataccggaccaacgggaccaacgggactaaccggagtaacaggaccaatcggagataccggaccaacgggagatacgggaccaacgggagatacgggaccaaccggactaacaggaccaaccggaataacgggaccaaccggagataccggaccaacgggaccaacgggactaaccggagtaacaggaccaatcggagataccggaccaacgggagatacgggaccaacgggagatacgggaccaacgggactaaccggagtaacgggaccaaccggagtaacaggaccaaccggagatacgggaccaatcggagatacgggaccaacgatattctcaccgtacagcgaagcggcgaaaacatcacggcgaagatcagcgttgctgagctgaccggggctgaatttatgctttatgccaccgtgggtgggcatgaactggttgtccgtgcgggagcggcggatgattacgttgccggagataatatcggcatccagttcgatatgaataagtgccatttcttcgatgctgatactgaaacagctattagataagaaaggtgttcgccggaaatgaaagtttccggttttttgtatgttaattataaaggaatattttaatgagtactctactaagaagtgctgcgctcgtcctgtgcgcaggggtgagctgcgcgcaagcaactgaatcagccaaacagtgggaatttaatattggcgccatgtatgaaattgaaaacgtcgaaggtcaggccgacgttaaagatggattatattaggagaagaagtagaataccgaattagttttaaaaacacggtagaaaacggaaagctagcagaggtaaaaatagaagacaatttaccaaatggattagagtatgtgaaagatagtttacgagcggaaggtactaagccggatccagtagaactgaaagtgaaagatggaaaagtaatcgccaaatatccagagattacggatacagaagaaagaagtatcgtctttaaagcgaaagtaaaagaagaatttaaagttggtgaaggccttgtcaataaagtagttgttgatgatacaaaagatccaacaacttcagaagtaacaattacgccagaatataaagacggtaagcttaaagcagagaaatttgtaaacaataaaaaaccgaaattaggagaagaagtagaataccgaattagttttaaaaacacggtagaaaacggaatggttttttattgaatcaaatctaaactttctttgagagattctaaaacatccaacattgccgcagatggtgtttcattattggtgtgcaccagtgcatttctgtattgaataattcgcctaaggtttgtagctaatggctcttttaatagtcctactttaattaactcattgacaattaaggtaagaggaagcgatttaatccttctggaggatgtgtcatctatgattgaattatatttattacgaagtttctcctctatctctacaaatattctcatgaatttaccataaagataaaattcattattactttcaatatcttgatcgacactttttttcggaaccgacgttaccgaaatctcatactcattcctatcgcctaagtccttaacaatttctttgctaactttggcaacttgcccactgcgcaatgctctgacttcccgaagcgtccctgctccgggtcacgtttacacggtcggaatgttacagccgtagtaaatttcgcgcatctctttccagagcaggtcggtaatgacctttcgctcttcctcacttaaatcttccggcttcgtgtggaacatgtagtgcttaaggtcgaattccttaagtaacattttggtgtggaagatattctcctgatagacgttcacatccatcatgtcgtacagcgacttcatgtcctcggacatgaagttctgaatggagttgatctcatgatcaatgaagtgcttcatgccgttgatatcatgggtaaaaccgcgtacgcgataatcaatggtgacgatgtccgattccagctggtggattaaataattcaacgcattcagcggtgaaatcacgccgcaggtggacacttcaatatccgcgcggaaggcttttatttaatagaagacgttcttctcagttgcatcgaattattaacaacgtatcgtttcaacggctctgcatggtaagcagctgactgaactccgggtcatccatcaataaattaaaattatcaacatccgctgtcttgtaactcaaaactcattcaaacacctttttgttcattatttaaatgttacgatcaagaataaaaacccttttcgataataagctgtggaaatctatcagttttcaattttttttattttagaaaacaactgttttcattctttgatattttccattatatagttgatattacattacccccagtaaaagccccccagacaaattctgtcctcacgacgaggcctgttcgaaggcctctgtagtggtgccacccagctctaccaggtggccatgagtcgcgtttacgaagcttctacgcagatttttgatgcatgcaatgcattcttcatcggttttagctcgtcgtgctgtttcaaattctttatctacaacctgttttatctcttcgacaaacttgatacgtgtaagaccatcttgcaaatagaatgctgacagccggtttgctgtttcgacgagtttccgggcctctagattcaccatggtatctgaccatgttctgttccagcccctgttaagcaacgcaatatccattaaagactccttcccaaaatgtgtctggtcattttaggtgcaataaggtcgaagaccataggaaatactttcacaacccacccccgtgggtgtcccgtctctttatcctcccagtttacttcctcctgcttaaaatatccccggctctattatagatccgctgagtggaacgattaaccgcctaataatttcacctgccaaatggtgattgttgacaagttaccctcgagaaaagatctgcgataacctgaactaaactttcaggtatctcttggccttcttcttggaataatcgctcttcacaagtctttttggctattggcaaagaaaatgcgactgcgtcagtaatatcagcctcagaaaagccttcgtaaaaaggttgttgttttaatccatttaaaataacatttgcctcttcctctaatattctgtaagtctctgttatagaaggcttttcattgttttcatctattattggttttattcttttttcttcgatgtgattgattaatgaagggaaaaatctgttgctataggtgtcaactaaataattctctcttatatcttgtgggatgatatattcgcctaagcatagatattcccagaacttttcagaatatctagcgcttcaaaagtaagctttaaaatactcatgggatctgtaggtacatgttgttggctctgaatatagtttttcatacggttaaactcattgatgtattttacctttagtaacattgctttttgcgttgtataactcatagttacgagcataaacgcatcgaagtttaaaatgtatttttcttgtattcgattgcggttatctcgatattcaatgggctcaaatttgagcgtattaaaattaatacctagttcatccacttcagcattatgttgtagacttgctaatttcgaaattgtttctaagatatctcgttttatatttttgtgctcctttccaaacatctcagcaattgtcaaactatctgttactacctcaccattactttcaaataccagttcgtttgctactgttaatccatatgcgcttttcatttcgggttttaccgaaaaagctaccgttataataaatcgcgcgagcttcactatcactgcaaacatgcgaggaataggttgcattgaggaaaaccgagggattttgttccctggtgtggtctatcgagggaaacagttctgcaacgatgcctgaaggaatgtacagtccgacctgatgaccgcctgttgcaccagtatcatttgctgacaagcgtttgatgtacagaaaataattgcccgttgtcttactcagtaaccattcctgaaaacctgacatatgcatccttacctgaagacaaatcgttctgttatactcgccggagcagtatctctccatgcgagcatatcgataccaaagcatgagttccagcgaggattaatgtcaacgctagattgttaccagctccgcctcttcaataaacttgattttcatttgaacagcttcttttgtgttataactcattgcaactagcgtgaaagcttcttctgttaagttatacttaaggtattttcgcccacgctcattttcataatttgactcgtgaaaatttacgagtgaaaattcaggtcctgcatattcaatttgttttctaatatctttcaacacattgtcatgtgtctttacaaacatttcagcaatcattagactatctgttactacttttccgttgttttcaaatactaatgcttgttcgtttgctactgttaaatgattcatgttactttcctcctctacaaattcggaataactttagttttattcgtattacgatgcgccaaatgcaattcattacttacttttttaaaaatcaaccaattatcaggattcaatggatctaataaataatagtattacaaaattatcgactgaagttgataccaataacacccagtctcaaaaagatacattaagacgattaaaaagtgtaacaactcaactcgaagaacaagtttataaattttaatattaagaaattaggtttaataaaaatattataacgcaactgaaaataaggaggagaatcaaatgatgaaatttccatttaaggttataactttagccactttagcaacggttataactgctacgaatggtagtactattcatgcacttgcacaagaacagacagctcaagaacataaaatagaaaattatgcgttaggacctgaagggttaaagaaagcgttggctgcaactggctctcatattcttgtaatggatttgtacgcaaaaactatgattaagcaaccgatccatatatcgtaacttacattgtctcggaatttaacgcagcatacttgtaaacgcggtttccctgttttacgtaccccatttatcattgctgttctaaaatgagcagataatgtgtattcatttccaggatgtatcccattattcacgattgcttctggatagttatacatatctacccttgcagcattcaccatttgctcgtaatcgaatatatgcgtattcttttctattacgacatttccccatgacttccaagtaagaccgtatccaccttcaaacccataataatcgttatgtccgatgtttttctttgtaacactagaaaagtcgggatctgctatcaggtttcgtcttgataccgcggttgtttttgttccccattcgtcttggaataggaaatctagcattttaacagttaagaagactacattgataatcttaaaaatttctggaatgtttcagaaacaaagttaattcaatttattttagagaatgatcaaaattattatgcatgggtaccaaaagaagcaaacatcccaaatatgtatgaagtgaagattgagagtgtcgatgtagaggaagttctataataagcaaattaaaacattgtgtatcatgagtaatgttgaaaaaactaatttatacggaatttaatgaattaagaggttaaaaatagtggtagtttggagaatccaactgccactatttttgtgtttacgaatggttctgtaaagtaagtagtgtgtttaatgaattcaatcattcatccgtccagcaacaattacagcaccgccctccaattagcggctagcatcacagccggactcgctgaagtgccatggttaacctgaacctgacgcaggaacgttatcctgatgttcagttccgcaaaacgcgcgagcattaattccctctcagagcacggcagccgccgtgctcttctttaattcctgtgttattaaacccttgcggaatgttcttaattcaccgcaatttttcgctattcgttcgttttttccccaattctgaatgcacccctctgattgtgatctatatttaactcagtgtttagcaccgggcgtggatgaattaactgttcaatgcatgtccattggttctccattttgccccggtgttaattcgcaatatataaaaccaagatttagggaagtatgtcgcccaaataacgggcaaaacacaggaataaatcgatgaatatgacaagactgaagatttctaaaactctgctggctgtgtcccagtagtcccggtagtcccagtggagccagtaagtccagtggaaccggtagatccagtaggtccagtggaaccagtagagccagtagccccggtaggtccagtaggtccggtagagccagtagccccggtaggtccagtaggtccagtagctccagtagccccggtaggcccagtagctccagtaggtccagtggaaccggtaggtccagtaggtccagtggaaccggtagccccggtagctccagtggaaccagtagccccagtagccccggtagtcccagtggagccagtaagtccagtggaaccagtagctccagtagccccggtagtcccagtggaaccagtaggtccagtagctccagtagagccagtagccccggtaggtccagcaggtccggtagagccagtagcccaatcactcgtgccattaaaatgtagctgacagacaaaataaagttgtgagcattgttgaaattcttcgctaatcactcatcccgtatacccatcaggcattagaagaaagcagttttttgttcctttgcattatttatttaatacacctttttacttttgagaaatggattacatttacattctccttgtaatgatgacccctttggtctcccttccgaattgcaggatttcatttcggaagggacttttttcctttcccggcttgctaaatattcattattttctagactcttacatagactttgctatgtcaggtgaagtcgtcgtttaggactacccgtgtgctcaaggatgagccaccctgatttcttcaagcttttccctgctaattaatcatctgcgccccaagaattgtcaggtccaacgggagcaacaggtccgacgggagcaacaggtccaacgggatcaacaggtccaacgggttcaacaggtccaacaggatcgacgggatcaacaggtccaacgggttcaaccggtccgacgggttcaacaggttcaaccggagcgacaggttcaacaggttcaacaggtccgacgggagcaacaggtccaacaggatcaacgggagcaacaggtccaacgggagcgacaggttcaacaggttcaacaggttcaacaggtccaacgggagcgacaggctcaacgggagtaacaggtccaacgggagcaacgggatcaacaggagcaacaggtccaacgggttcaacaggctcaacaggtccaacgggagcaacaggtccgacgggagcaacaggtccaacgggatcaacagtccaaaagagttacatagtcttttgcccccgcaattctcgatgcatatctatccagtttcaaacttgcgatagaatgaggattaaaggcttctaacaggcttttcagattaccgaaggttaacaactcaattgacacccatcctggaggcaacccccggtgaaacggacaatattcgttaaagtattttgacctataatgttctgcaaattcttcttttgattttctgaatgacatgcttacactggaaacagttctgatatgattatcactatgattaaatagggatgaatctagataccaaaacgaattttgattttttccagtaacccagtaatcaaaagaactgcgcacggcaatttcaattttttgtatcaatttaaaaaccagcagccgtaacccctgatcaaacatttctttgtatggattatttgcgctataattgttacgactatccttttcaaggatggaatacagaaaagcattgagcatgataagtattgttcaaaccttcaacacttaatccaaagaaatattgaccctgaaaaaaacagtacgatctttaataatttgtactgcagattacaatataacaatacattgctaaaaatatccccataaaccaccaactgatttgagtgctttctcaaatcagttgatttaaagctaacgattaaaatttcatatcatctgcaatctcagtaaagtgctgaggaaagtcctttctatttatctttcttgtcttatagtctatttcgtagatctcaccaaagatatcctccttattgacgaactcattttcaatcataaatattttattgaatgtacggaatctgagcgtggatcctctcgtgattttttccacacggaccgccagcgccagtaatacgataaagctcagctgccgaaaaaaatagaataccgccgtatcgttggtttttgccgcctgggtaaaaccagcatgctccggaagctgaatgacaatgatcgtctcaatgaaataaaccagcccactaagaaatgccaggctcagaatgaataaggaaaaacgcgatcggtcggaggcatacagcatctggataaaaataaagataatggtatccagaaagaacagcgcaatcatgacgatcaaataggtggtcataggcaccctgaaaccaggattatcattcacgcaaaaggagttcaccgcgatcataagcgcaaaaagcgccgcacctgacagcatgatcaggatttgaaaatgaattaaagcaagtaaaccgtcaagctgaacaaaaagggatggacaagttaaataactctttgaaatccttacaggctgaatttcagtctattacaacaggtatgggcggtttttctaatgcaacagagcaaacacgggcaaaaattgatgttctcactcgcatggtggataagcagaaagaaaagattagggaacttcaacaagcctataatcgcgcaaaaactgaagaaggcgaagcgagtcaatcggcacaacattatgctgaacaaattcatcgtgctacagctgaacttaatagatttgaaactgggttacagcagtcaaatcgtgaattagagcagcaaggtaatcgtttattgaattttggtaatcgtatggagacattaggtaatcgtcttccttgacgtaaatggtatccgggtcatcagccagtaacgcccttcataacaggaaagagatcatcatgacgaaagcagaaaaggtcgtctggaccgagggcatgttcctgcgtccccaccattttcagcggacagaaagttacctcctcaaccacgttcgtgagtggggggccttgcagcgttcgtatctctggggctttctcgaccttgagctggatgaagcgatgcttcgccagggctgtattgccctcagctactgtagcggtttgctgcctgacggcacctttttccaggtgcgcagcgaccgcaacggtccggctacgctaaaaatccccgataatctcaccaatgaaaaggtggtgcttgcgctgccggttcgtcgcggtggccgtgaaaaagaactaagtgcgccaatgaatgacttgattcttactataaaaaacaattgttgcataagtgtgactgtggtcttctttattgcaataataggttgtatttctcacagcaaactcaaggcattggcaataaatacaaggaaaaatattcagcatgaaaagtataaaatcaaagattagtttatcgctctgattgcatttgaattgttgtatcgtacattacccacagcatgcgacactgcatgccagataaacatgtcggtggacactgtcccgtcggcaactattccttcagcttcgttccctcctacaccaggacgcatccattctcgtgctgcttccggtgacagaaccagtggccgtcggtcgtgaatatcgaccagtcctttgtcagctgcttctaactcctattttacaaggaattgctgatttcttctctatgatttggaacggtatttccacagtgattcaaactgtatggaattttattacacaatacttacaagcgatttggacggctattttatactttgctacgccaatatttgaaagtatcaagaatttcatttctgaatgttggaataccattagttctactacaagtcttgtatgggaaacaattaagaatttcttagtttcctgttggaatgggcttgtagcgtttgttatgccgatttttgaacaaatcaagtcctggatcattgctgtgtgggatacaatcagttcagcaacaacgtctgtatggaatgctgttaagaatttcttacaatcgtgctggaacgggttagtaagacttatcagctacggcatgccgataaactatagtctgttcaaggtaaaaaaagtcaccaagcatgcgccaaatcccatatcctatggtagctaacataaataacacaaatatattcttatttttaaaaaccagatctcgatgcataattattccatttattttccatgcgtacggcttcccttctcagccaacagttaaagctgacctttttacaactcgcttataaaaagtataggggtattgtttatgccatggataataagtccaatagtgatccaagtttttaatgttttatatcaatttttagcactgaaaaagattttaagaaaaacttcatcaattcatggttatgcccgttaatacaaataacgccaagtcaaaactatctgctttggctcgatcgaaatcgggacggtaacgccgcgtccgcagccgggaaatgacaagccacgtctgtttcgcctggttgaagccgaagggctgatcaaccgcatgggctttaataaccttggcgtcgatcatctggttgagaacgttaagaaagcccattttgatggcgtgctgggtataaatattggcaaaaataaagacacgccggtcgagcagggtaaagatgactatctgatttgtatggaaaaagtctatgcctatgccggttatattgcggtgaatatttcctcgcctaacaccccagggctgcgttcattacaatatggcgaagcgctcgacgatcttcttagcgccattaaaaataaacaaacggcgctacaggcgatcctacaacaattaataaatgagaaaccagagcagccataagctgttttttattttgcataaaatacggctttgaatcaattcaattcatagatcaagaggagtgatttcgcttctctttttattttgaggagatgatcagtgtgaaacgaatagtagaccaagtaatttatgaaaagcatgttagccaagaaaacaaaaacctagtcaaagattttcttattgaaaagaaagcacaagggaaagcggcaagcactttaaaacaatatggttgggatttgcgaattattttgtttctaatacatcaacacttcgaaaataaaaatctgactgagttaacacgtaaagacatccgaaatttatctattatttttcaggagatgggaatgttgttgtaaggcctaatggttataggtctctttagcccctgatttataatgttttctttaatttcctcataaacaaaacgattccttttcctttcatttgcaataaaaacatcgcaaacattaaccatttctacaacttcgctatcggatctactcatttaaacctccagtggagttctctttaacatcatctccaggcattcaagattatcaaaacggtaaagttcagggataaatccattttcctcatttaaagtgattgaatcggataatatatccattgcaggtatgaggtaataatcaacaatggtcttatttgtactatcaagtcttggatataacatcatgtcgcaaaaactgacatctttaaatgaaatacgccatcatccctgcctggttaagctctgttgccgcgtagagataaaaggcccactcaacatcgctgacaggccacttttctataactatatgattgcaatcactggtgttcagcaccactttggcagtgcccatttcggataaatccatggcagacatgtactgtcccttaaaaattcacatgttggttgttattaagtataatgcaagtgtggtacagatgaagtcataaaacgtcatccttccttaaaatcctacttttaaagacttgtgcaatcacactaacccccactaaagaacgtaggtatcataagaataagaaaaagaatatactaatacatgttggatatttatttttgataacatttagcctgtagtaaacaaaataaagcgaggtgctggtgaagttcgaccacgaggcgccgaaagagtttgcctatatggcccactgtcatctgctggagcatgaagatacggggatgatgctcggttttaccgtataaaaaaaagccgggtggcggcttcgccttacccgacctacgtgataaaagtcctgtaggcccggtaagcgcagcgccaccgggcaatacagacgggcactgaatcagtagtaggagtgctcgccgcgctggtgctcagtcagatcgcgcacgcctttcagttccgggaattcgttcaacagctgcttctcgatcccttctttcagggtgacatcgaccatggagcagccgttacagccgccgccgaattgcaggatcgccagaccatctataacaaggaagcgggcaagtaaaccgctacttttaaccatctcgccatgtttttctaaataattagtaaatacgccaggctgaatcattagtgaaagcatcagacataatgggagttcatagttctcgccatccgttctgtcaaatgaatatttccctccatcccagcctttattcaacagtccgaggtgatttttcaacccacttctgaaaaaagagatcgcttcatccatgatgatgccagcttcagcatgcaggcttaagccctggataagagctttaaatgtcacatcctgatagatgaactttggctcaacaggacgtttaggttcacgtttataatgctgctccagctgagcctgagcatcctcgacaccatattttgagttacacagtacgaaatttatgagtaactgtatagatttaaaaagaaaaagcaatgcttagattttaaacctagtcattgctttatccattgcatcttggtttacgcctatataacgtaacgtgaccttctctgacgaatgattgaatatctccatgagtaatgctatgttttttgtttgcatgtacatatgatacccatacgtctttctcagtgtatgtgttcctatttcatctaatccaaactctgccgctgctccacttaatatcttatatgccatgctacgcccgataggacgattcttcccttgtctactttgtaataaatactcattatcttctctttcttcaataaaccatttaagttctcttttcagatatgataataagcctggaaaaacaggtttaatttatgagagtggtgattatcccaatacgtggaatcagtattatggtaggttgtggatcgctagaacgggtaatgattgggaggcgtatatttcaaagtttcttcctggaacagaaaaagatgatgcagagcgttttgcaagatggactgataaagacaataaacatatggaaaaagcagctcaaatacaaattagtatcatgcagtggcaagatgttccgccagtagaagcgatgacagtttctgatttgaaattttggaaagtgaatttaaataatcaaaatacaccaccttatatagtcgatgttggtgacaaagttgtgattgatacagaaagcagtcatgatttaaaatcgcactcatcagaagcgctgtttttttgaacaacatcatcagaaatggtcacccatcccaccccgggtagcgattacactttaatcagaaaccctgaacagagaaggagagcattcccccgtatcacagcacgcagtcgtggagcgcatatcatgaaaagaatcgcaatcgccattttggctgcgcttttgctcagtgcaaacgcgatggcagccatcagaatagacagccaacaggccagaaacatggatgatgtgcagagcttaggcgttatttacatcaatcataacttcgccactgaaagtgaagcagatcaggcgcttaatgaagaaaccgatgcgcagggcgcaaaatactatcacgtcatctaccaatgttatgttgtaattctggataaccttacaaaaatggtttttggaatatttgataatttaatattgaatctaaaaacattcttctggtgaatgtgtgatatatcccactctttaaccggaaagtgaataaatactcctggtaaagttgataaaccacaaaaatgttttaaaggaataatggtgttttattaatctttaattgcctgaaagatagcctttattaatatttttaaggcaaaaaaattcacgctggttattgccataaaataaatttattaccgcgttttttattgatcaatgtcagcgtaaatgcgtatttttattgtgataaatctttgatttataaagatataaatagttttccaacacagcaggatcccccagcacatctgggcaattgataccaaattcattcctcagacgattacgagttaaaacaccacgtacagatctaatatctaaatctttggtttttaacggggcatccttggatataaaaccacttccccatattatactttttgacgatgcactggacaaaacactaccgatcgcaagtatatgaggggattgtttgaaattattttttactacagttttcttcgttattttctcaatcaaatatttgttaagctgatcaccccaattattatgtcgagtgtaataattaacaggcactttatcttttccaattgctaacaatcgatctttgaactcagtcgacagagcaaagagttactaactcatcttttgtgagataccgggaaaaatataagggcgaaaataaaactggagattttttcgtatactcgacggtgaaaaaaatccctacgaacattatcattcatttgaataaggtagatatggaggaatatatttactggaaagaggtgaatataaatgcatagctttataaaaaaaacgtgctgcttcatgttgatatcagttttcttcttttgcgttttgctaatggtgattaagaccatggcttatcaaaacgcaatcaagaatgatactatatggagtcgagataataaatgcgaactgactacttatattcctgactatcgaccatatggtggtatcgggagagtgttacggttcaggagagctaaaaatcattttatttcccaagagattgtaatttttttgaatattagcactgcaatgcagcattttcaattttttattagtagcctatcaataccgaacgactccgccaccaagcaaaaccagctatccctttgatttaaatcatttattatgataaaaattgaccaataggttttctattgctcgcaaccagatgcatgctggtaaagccaacagttgtcgtctttactcattctaaacggtcatgtcaataatatagatgctctgcattatctaactttggggttaaaacataacgcatttttctcaaaatatagttatcatttctgagcttaatttgacactcacaaaaagagaaaagtttatttttctcgatgcaagaacatctacgacatgtggtagctcagaaagcaaatctctttatattgaaaaaaatgaaaatcagtgttataaaatatcaggaaataaattctcggagttaagactaactcttgtagataaaaacatctcgaatataaataataaaggcacttcaacttatgaacaaaaataaccctgctaattcattttctatagaagcaaggaaagaagcttttcggagagctgaagccagtctttttttatcaagtaaagatcccaaaggctcctcattttttaatgaaataaaaagtaaggtaatcaatggagagctaacctatgaagaggcaaagagagaagtatcatagtcccactgcggtttctctggtacggtaatcaacgctgggatatttaagtggtcatatcaattcccgcttctggtacaggagttaatactattttataacctgcgtgtgggattgcctcaatgctgtgatggagttcctggctggtgaattcattactgatagcatgatcatcgccagtggcaatgaactctacggggttgagtagcacgcccgcttcagaaaaattgagcgtcagctctgaccttctcaccagcaaggctggaatattggcatactcttcctggagggctggcgttgcccactcttcatcacttaccacagcatttaaccagccctgagatttaagtgcttcacttgcataattacttcatataggctgtcatctttttcaattaaacggtcttggttgtttcttaaaaatacataaccggttaatgatagaccatataccgctcccagaacctgggcttgagtagaaaaaatgtagagatattgattctcattcaagaaaataaaaggtgattggaatgctgcaataatccatattgctgttacagctaaaatcatcagcagtaacggatatgtatgagaacaaaaaaatcgaaaagtaaactctaatttattatcgtttcccaccaggtcccattcccattttgataacttattttgataaagttttgataaccattcgaaaactaataataaaaacgggaaccaatcgcaggcggaattaagcgcgctcaggtattccggcatcccgtagagctcctgattgatgtcgggctcaagcagatgacagactgagccgggggcaaactggtgcgggtgcgtgaagtccgacacgtaccagtaaaccccatcctcgacaccccggcgggtgtatttggccggagaggtttcaagcttcatgagctggccggtcacgctcatgcgcttttcaagatagccgttggcaaacaccagataatcgagcacaaggcggctgaaatcctgccgtgaaagcaacggatgcgggatgtaggtgctcgtcaggatgttacgcttcacataaatcggggagctgtgatgcacggcggcgcgcagagtcccgatcacgaacaaaaagtggttaagcttgcggaggaactgaccgagtccggtattcacgtgatcttagataaatgggatctaaaagaaggtcatgatgctgtggcattcatggagaaaatggttacagagcctgagatccagaaagttgtcattgtaagtgacaaactttatgcggaaagggccgatggtcgatctggcggtgttggtaccgaaacccaaattatttcacgcgaagtctacgagaatcagcaacaaaataaatttgttgctgtaatcactgaacgtgatgagcaaggaaaaccttatctcccggtttactataaatccagaatttacattgaccttagcgatgagatactctacggcgtcgatcgttaatcaggatcccctggtttgaggtggtgatgatttcacctgtacgaacgtaataatctccctttaaccacaggatataattcagaccatactgtgtttcaactttgccaaagatagttccgctttccgggctcgcaatagtctcaacaaccttccattccataaaaccctctttactcgctatattgctgttttgtcgtgtaaaaatgctgcttttctggcacatcttatgcaaatctaatttcgcaccataaaataagcgtagacaaaggcagacatagtgagaacatccttacaaaaaaagggcaatctttacaaaactggcgtgacccttctaacatcctattttttcttattcccccttttcgaggggatgggcaaaaacacccaatttttgaacatttactacagctacacccatttgtgtattttttggtagatatgatggtatattattttcattccataaatccaatttatacagttcttcttttgcatctagttctaaaatatctccacttgcaatatcttgtactaagctatcaaaatatgattttttgattccattataacttccataactacctaacttacttcttaaattatgattaaaccctgaagtttttggtggctctacatgggattcagccgagatacgtgtaaaaatgggtcatagcctggaattcgtttcccgcggcacctatttcgatcgtcccgaagtagaattacgctatcgtattattggtaccgatgatttcacgctgggactgacgggtggtttccgtaattacagctatcatttcaaagatgaggatggcgcgaaagcgggcagcgcaaatatgcagcgctataaaattcaaccggactgggatgtaaaattaaccgatgactggcgttttggcggatggtttgccatgtaccagtttgcgaatgacctggcaaaaaccggttattctgacagccgtgttgaaacggaaaccggttttacctggacaattaacgaaaccgtctctgcaaaagttaattactatttagagcggggtttcattgcattttcatgcaatatagtggtccattcttgagggagtttaaaccattctgaaaccctctcaaaaaatagaacccccagaaaagcggttgtgggtatagcaatttttatcaatgaaaaatatgatttcagggtatgaaataaactcctatttaatattctatctatctttgagtcagggagtttatctctattttctttgtatagaatttgctgcaagatactgagttcgacttcctgattagtaagggaagtgtttttgtcattttccatcatatcgaaccctgccaaagatacattcatgtacttttcactgcagtgatatttcataaatgaggatataaccgtactttttcctgacccatttgcaggtaatcgatcactttctcaacgcgcttgtcagcgatctgagagatgtgtaccagaccttctttaccgccaccgatggcaacgaatgcgccaaagtcaacgatacgggtcactttaccattgtagatacggcccacttcgatttctgccgtgatctcttcgatacgacggatagcgtatttcgctttctcgccgtcggttgctgcgatcttcacagtaccgtcatcttcgatttcgatggtggtgcccgtttcttcggtcagtgcacggataacggaaccgcccttaccgataacatctttgatcttgtctggattgatcttgatggtgtgaatacggtattctcagcgtcgatcctcttctggtgtcagctcctctggctggccttgcactaaatcgtaaaacctcgccacggcggggttttttgttttatccctcgtgttggaccattcctaaatttatcaatttgggttgttatcaaaacgttacgacatctttgtgttatctttaattacagccctgatgattgtcaggacatccctgtttttaaggaggagcttatgtcgttaaccctacgcgaagccagtaaggacacattacaggcggaaaataaaacctggcgctactatagcttaccgctggctgccagaacgcttggggacatttcgcggttacccaagtcgttgaaagtccaaggagatcacctgtattaattttgaaggtgaaggattttactctcctttttccaaaaatgacatactgagagagtacatacaaaaattaaatatattcttttatttcatgataaaaacaaaggccatcaatttaaaagatcaaagtaatatcaaccctccacttatgaatggattagggcttataaacgcaattgatgcgcatatgataactaaatactctgtaaaaattgtcgatagaacttatcccctcctaccatactcagaggttttaccaataggcatatccagatttataagtcgccttgagataaacgctgcgctggataaaacccttgaagaatatataactagctaaagctttttgatattcatcttgtgctaacttattattcgtagcaaagcgatctacagaagtaatactgtcttcagttgctttttgatatcctttatatgctaataccccaacaccaacagcggccgccaccacacctaatgcaattgctactggtcctaaaactgcggttaatattcctaaagctgcacccgttacactagtagctgctgtagctacacccattgctatcgctaaagaacctataccagaaacaaccataccgattgcccccattattactccaataacagtagcaaccgctgttagcgcaagaacaataccacctgtaattgcaatgggagggtatatcgaagatagtcaagacttagaaatctatttaattcgctacaatgccaaacacgaaacagtaaatgtgccaggtacgggttccttatggccgctttcagccccaagtccaatcggaaaatgtgcccatcattcccatcatttctccttggacattgatgttggatgtacagacttaaatgaggacttaggtgtatgggtgatattcaagattaagacgcaagatggccatgcaagactaggaaatctagaatttctcgaagagaaaccattagtaggagaagcactagctcgtgtgaaaagagcggagaaaaaatggagagacaaacgtgaaaaattggctgaatattacagatacttgatggtaaacgttgcctgaccatccatgttggtatcatcagtaatagccagcgtattggtatcctgaatcgcagcagaaaccgccatcggaatgaccaggtttttaaacgcaactggcgcggtgctgccaactgtagcaacggatacaatctggctaccgtcattaaccatcagtgtgccgttatcagaccagctggtgccgttgtctgcgctgtagatcgccccaacagtggcaccatcagcagtaatcgtgtcgtttttcacgaaaatggtgtagttaccgatgttaacgtttcctgcggtcttattcagaccaaacatattgaataatcaattacagcaagaatacaaacaaggcacacaagctttacaaagattaaccgctcaagtttctagaaatgatacagcatttaataatgcttcagcagccttacatcgttatcgtaatgagctaggtgatacggaagaaagaatagagcgattgggtaacgtttctggaagattacgcgagcgtatgaacgaagttggaaacacaatgcaagaaacaggtacgaaagtgagccaagggtttggcgcagcagcagttggcgtggcggctggagttggagctttagtcgtaaatgcaagtcaatttgaagaagcgaacaagaaggtacaatctggtttaggatataatcaattacagcaagaatacaaacaaggcacacaagctttacaaagattaacagctcaagtttctagaaatgatacagcatttaataatgcttcagcagctttacatcgatatcgtaatgagctaggtgatacagaagaaagaatagagcgattgggtaatgtttctggaagattacgcgagcgtatgaacgaagttggaaacagtatgcaagaaactggtacgaaagtgagccaggggtttggtgcagcagcagttggcgtggcggctggagttggagctttagttgtaaatgcaagtcaatttgaagaagcgaacaagaaggtacaatctggtttaggatctttgatccccgtctggcgtcgtccatcaccatgcgcgggcacgagattatgcgccagaccaaagcgctgattgaatcccggggctatgatgtgatttatggcgatacagactccacctttgtctggctgaaagccgcccattcggaagacgacgccgcacaaatcggcaaagatctggtcgcctttgtgaacgactggtggcgcgaaagtttgcaaaaagagcggttaaccagcgcgttagagctggagtttgaaaaccattttgcccgctttttaatgccgaccattcgcggaaccgaccagggcagcaagaagcgctacgccgggctgattcaggaaggtgcaaggagtaatagagttattagagacgcgcgcttcatgctgagattccttattcactgaccaaacgtcagaaagctgaaaaaccagcgaggtggaaaccaccccgcgaaacagaatgaatgctgttctgtcagtttagctaaggattgcggctttggcgcgtatggcgcggatcatcgcttccagtccctgggatcgggacggggtgaggtgttgggttaaggccattttttcaaaccacgggcgaacgtcaaaggcgacaatatcctgcgccgacatctggtgataaagaataaatacgacggcaataagccccttcacaatggcggcatcgctgtcgccctaaagcctacacggtcagccttaccggtagccgcattgaagattgcaacgttagaaacctgaatagcagcttctttttcaacgatgccgcctggttggttcagggccggaaccggcttctgatgtttcttaaccaggttgataccttcaacgacgagtttgccggaagacagaacattttttactttaccgcgtttacctttatctttaccggttaacacgataacttcgtcatcacgacggattttcgctgccatgattcgctccttagagtacttctggtgccagagagataattttcatgaacttctcagtacgaagttcacgagttaccggcccaaagagccgcgtaatttaaagttcaggacaaaggcaattcctaatgcaaaggcgagctttagcgggatggttaaaaatacataggcaaaggtcacgcccatggatttccagaagagcgtgtcttcggtaaacatgtagcgatagttttcgatgccgttaaacaccggcggactcatcaaatcgtaatccgtaaagctgaggaaaaacgatgagacgaaggggaatgccgtaaagagtatcagcccgatgatatagggtgatatccatgcgagccccagcagcttgttttcattcatacatacctacctggcaatcaatggtttaatacgaaatctgctttgttacattcgccgggttattgttcatggtcagaacaatgatcgaaatgtccgggaagtggcgtttaatgtatttgatgagcgtgatcccatcaccgtatttatctccaggcatggagagatcggtaatgagcacgtgcgcatcaagtttaggcaggttgttaatgagggctgtggaatcttcaaattcaccgactacattcacccactcgatctggtcaagtgatttgcgaataccgaacagtacaatcggatggtcatcggcaataattacgttcatattgttcatgtataaggctaccttgctacagcaagctcttgacgtaagcgtcaatgtcgctgttgtattttaaacggcagcgcggcggtaaagccgtcgcggatggcaatcacatacttttgctgacccagcttcgcggccagcggggtaattgattgctcaatgaccgcgaccatagattgatataacgaactcatgtgaacaccttttagtgtgccgcttcgataagcgacagagcatagtccagtactttatcgccacgctgcatgccgtaatccatcatgtcgatgggctgcaccggaatgccttgcgtcgctgccttgtctgagagtgtctttaacatgtatttcacttgcggtccgagaagcaccacctgatagtgcggaaactgcgtatcaaattcggatacggcttcctgatcgacagccgcgataccgaaaccgagaatcgtctggaagggctaagtgacgctttcagcgtattccgctgccatagcatcatgaactgcgtcagtgtgtgtcctaaggggctgaacccaacgcgcgccatcggtcatattaagtcgatgttgttgcagcgcagtgcgtaagtagtgagaggggagcgctgttcccctcaccctaaccctctcccacagggagagggaactctttccccctctccctgtgggagagggccggggtgagggcatcaggccgcactcctcgacaataaactacgggcgatagaccttcacattcgcgaagccctcgtatggattgagcttttatcaggagaactatcaaaattagggggggaagagaaggaaagaggggaaaagaaaaggccccggagggcctgaaattatttacgtcccagcagaagtcccagaacgatacctaccgcacccgcagcgattaagcccgttaacgggttatttctgacggcttcagtaacatccgagacggcatcactggcctgggcagcatattttttcgctgcacctttcacctggtgtttaggggagtcaacgaattcaccaaactgctgctgcgcagagccggataattcatcaagtttgtttttggctttatcgccagcgtattgtgcaaatatgcgctgctgagcggtaagtccatcatcatccaccagctctcctgcgctttgttctttttgcgcagtacgcacttttttctgcgcagatttttgcacagattgcgcagaaggttttttgatatatcgacgtgcggtagcgtagttcagtccctgcgcttcacaccattcctttggtgatacgccggttgcggcatgttcggacaggaaccgttgctgaagctctccccagtccggttttgccatataaactccaataaaaaaccgcccttaggcggttaaattttgagatttaaaattttggtgctaagccatacttaggcgtctttatgttagggtcatgaggaacggaataaaatgaatattcattcgattgatttgcatcgagatggagaaacggtaaaagaattttatgcagtgtctcctatcgatgtggaacaagaagcgatattatccattgaatttgaagaaatgacgagtgtacttgaagaaaaagaaaagtcaattattctgcacgtcggtgaagggtataccacaagagaaattgctgtgaaattagagatgaagaaatctactgttcaaacaagaaagacacgggcatttttaaagatgaatccagattataagccaatcaaacaaaaatcctttttcttggggaaaagaatgataaagagaaaagcaaaaaagactagatgcaataacattactttgccgtggtttctttataggaaaagatgaaaccttatccatcacaaaaaaaacatgcaatgataattttggcatcagtgagaacagcatcacctcaataatcaacacattaagcgtaaaaaaaagcatcactatttcaagaaaatatcatgataggagagaattgttaattgaacccactaataaagggataacagaaatgtttttgttctttataagagtgtcgtttccaagagtaaagagaagtgattatgaggatctagttgcaattaaaagtgggaatatatataataaaggactcattaaagggctaccaaaacgccgatcaaggtcagttggcctccttgagtactaataagaatatggaaatcaccctttataataggtgtcatttgtgtccatacgaccagagtaatacctatagcgataccaatacccatcgacatgcctagatatcgcatagttaaaccgtagttaatgttccccccacatagcaccgaacaaaaaaactggtcaaacctcagccccctaaattgaagatccgtttccaggggttttcggatctcaggaggaatgcagaaggatttatgccgataatgcactaatgagagatgattgttgcaaaaatcagatatttgtttaaaaccagaaatatatattttactcatatcagactcaggaaaaggattttcgcattcataacattcttctccaattacatcttcaaatggatttagcatgtaaatcgctcctatgatttatatttgtttagcacttcttgcaatctctcacgctcttcatcaatagattgcgagttttgcttttcgatttcttttttagttggctcaacatcttcacgtaaccattctggaacaatttcttttctatttgaacgaccaggtcccgaaccattcaatcgcttgttcttactcatttcaaagcgtctatctaatgcagcaacatcatctaatgtttttaggaagctgttaaaaagtatgctaagtttacaacggtttcacgtagtttttcatcattgcaaacaatattaagaggaatcaaacactttatagtgttcttacaaaaatattatcctaattggaacggtatcactgatttgcaaagatcacatattgaacaatatttattatacgttaaccataatttgggccatttatctgaaggaactaaagcggattatttgtatggagtaaaagtatttatagattacttacaacgtactgaacatcctaaagcacctactacacctgttttcactttgttcttcaaggaagatttcccaaaacaaagacgatattacatggtttataacgaaatagggatgtcagagcgtacttatcgccgttggaaatctaaagcattttataagcttgcttttgcacttggattagaagtttatgagacagaagagactggaggtaatgaataatgaattttgttcagccgatacgtgatccagaagaaatacagcagctaaaagaatattttaaagaaaagagcttacgtaattacattctcttcattatgggaatcaatacaggcctgagaatctcagacattttgaaattgaaggttggagatgtcaaaggtagtcatatatctatgagagaaaagaaaacagggaaacagactttgcgtgcttatcctggagacagggtgtcggtcttggtgtagggttggctccgaatgtaaccattatgagccttagggataaggcgaaaagtctgagaatgcgcaaagttatatgagcacaacccctgtacaacgtgaatatttcctcgactcgatccgcgcatggctcatgctattggggatcccttttcatatttcactgatctattccagccacacctggcacgtgaacagccagatggcctcctggtggctgacgctgtttaatgattttatccatgccttccgcatgcaggtgttttttgttatttccggttatttctcttacatgaagactggcaggccagtggcgaacgcacgctcgcacagcttgctgatacgcgcgtccatttcatagccgccggtcagcagaattgcaccgatttccacgccgttcattgcagccaggcacgctgcaaccagcacgtctggacggtcagcagaggtcaccagcagtgaacctgcgcggaagtgttccagcatgtgtggaatgctacgtgcgcagaaggttacggacttcacgcggcgggtgttgatatcgccttcgttgatcacggtggcgttcaggtgacgcgccatatcgattgcacgggtggcaatcagatcgaagctccatggcaccgcgatacacattaagggtaatgaatgaaaagaatatcgttttttttgctattcgtgtctataccttcaattgctgatgagttgatatattctaattattttagggattttacagaggcgtttacgcccccgattatttcagtgaatgattattcaaaattatcttcttataaacttcatcctgagctatttgttgatttcgggaaatcccctccagaatcatttgataacaacgatttgcataattcaaatgttatatttaatggtgcggcatctaaaaagttctttatcaattttgtcaactccactcttttgaatggtgacgttttgaatgggtccagatgatattttaactcgtgaacaaatggcacaagtgcttacaaatgctttcaaattcaaagctactaagacaacatcgtttactgacattgataaaaactcatgggcattaaaagcaattagcgcattagaagaaaatggcgttactattggtacaggaggtaatatgtattcaccatatacacatgtaacccgtgaacaatatagccaattcttatataactctattaatgcagtagaaaaagaaacaaaaccagaagtgaaaccagatccaaaaccagaagaaaaaccagaagtgaagccagacccaaaaccagaagaaaaacggtggacgtgccggtgaacagttggatcgatgttcgcctggctatgccagatgattctgcctttaatcagcggatgaatcaggaacttcagccatagccacacgctgattccagatactgtttagcggcatctctacacggacactgacaaactgatcggccggaatatcggccggttcaccatccactaaaccttcccgtgagttcctcgcaaatatcggtgctcccggatattcccggtggaatgttttcacgagcactgacccgtcggcatttacctcatagtcaagccagatcagggcctgcccgttgcgatctttaggaatatggacattaaattcatagaaaaaattctattttattctgcacgccgtttcccctcgcagataaagccctgtcgataaccctgccacgatcacaatttttcttacagaaacagcagtaactcactgaaaaggcggtggattaaccccattaatcaaccttctgatgcttattatccgctcatttacagaataaaaatctggcatgaatattattagaagattaaaacaattgcatataccattaaaaccctttttcaattttatcttcctctaataattggcatcagctttactcgacggtttgtattggcttacattgatgccatcgcctttcagcaagtgctccatcagcaaatgtatttaaatcaatcatgacttccattacttttctcacctaaacctttcttattaaaattcaacatccacttgaatatcgatgttcataggtagttcttgagctacaataattgaattaggactcgttccttttttaatcaacttttgaactccttcttttgcggcatcctttgttttgtatccaaaaacatttggtgtactggataaactcgtaacaattactaaaatttgttgttgcatgattgctcctcctactgaacttccgccatatttatttgtgcatttgtagctgtaattttacatggtttgaaggttctggtattgaaatatttttatctaaaaagcatatcaccgatttaagtacggttggctacagccttagtagcggtatatgtcgttatgctattacgacgatcattttgcaaaatggggatcgcagcgtcaccattatgccagaacaggtgatcaggggggcggagaaggggtgtgtgacgatgagtattactgtccccgatagtctgtcgggggcgaggatattccatttaagcatggcgcctgaagcaggctggtatattcgtcgcgggcatcaaagtgcaaaagagaatatcctcatgactgaggccgcttaaggtttcagtgatcggatagcccgcgttggtagaaagctcgctcagcgcgtggtgagtctcttcggagatgcgtttctgcatatcgccgagattcacgtcgatcagaccggtgtagaggtcggagtaattcacatcaacgtgaatcagcgaaactttcgcgttgtagggacgtgccatggatactgctttatcaaccagcactttactctccggggagaggtctaccgcgataagaatgtgtttgtaagccatagtgttactccttccttaagttatcgatgactaaatgggaaagccgtcgtctgatgctttcataaatcggttctacgtacctaccgctcttgacgtggatgaaagcgaagagtgtgagtttgacatgatccgtgaaatgaaaaacaacggggatctgctaagactgctttttgagtataaccatttaatcgccagtaaagctgaagcttcattcacttttaatacaaaattcacgaactcggatgacttcgacaacaagcaaaccactgaaaacgttgagagtaacatcactaagtcgctatgcattagtgtcataacaaaagacgacgcggaggaacgactgaatgataaaacaactcattaatgaagcacttgtggcccatggtttcagtaaacgcctaaattggttttccagcatgtcacacaagcgcctcgtcataacccgaagcggcttatcaagtgaaggtagtttttacggtcatgcacaggctgggatgtcatttgtgtgccagaagcagactttaatatagctccagagtcccttatgggagctatttacatctgtcaagctttagcaagcggcttcattcgaaaactaatacccatacgattaatggcattcatggtggcaataacaatggtaagttcaaccaaatctttttcaccgaatacagaaagcgctgcggaatatgcttcatcggaagcatattggcttacctttaatcaaacgtgctcacgcctgcatacccttcccccttgcgatgttaattctgtcaatgcattcccttaatgctttgacttgctcaggggtaagttcagattcatcgattgtggccagaagagcgttgagggagcgctcaatatcgtttttagtcaaccgtaaacagataaccttaacccaacgtggcgagaacttgctgaggccgattgctcttgtgatgcgtagtttcatgagatgcctcttaaccgccagtggtggcgatttcaaactcgcttataacacacgtggagaagacttatgtgattatcttcacggcgtttaaaaccctggagttgataaataatctgctccttctgatgataagtaaacaggttgtcgttcagtgccatccttacacgctgggtgacaggcaggaacttagcggaaagataaaaagcgatatctgcataactggcgtaaatattcctgacatcttcataggttcccatatagatacgtcctgatatgatctcagtttcattaaatgatgaaaacgcctttacgagatcagacatcgtcttgtaccaggaatcctcactgtcgcacggacgacattccagcctgataataatgtcaataatatcagccagcagataaggtcatatcattttcattgtcaggaaaaaaaatcactattacctgacagaagggaaaattcaatgcgtagcggggacagaaaagcaaaaacccagccataggctgggttctttaaatagtggtgcccggactcggaatcgaaccaaggacacggggattttcaatcccctgctctaccgactgagctatccgggcaacggagcgcattaaaccgcaatcgcgcgcgatcgtcaacattatttcgggaaaagctgttcaactgcttaagtttgcggcaatctgtccgtttgtgtcctggaattgcacaaatgatcagatactctccggctttcatacgagttacagaacagccttctgattcgtcattagtttcaaacgaaccgtctgcatacagtttaactactggggaagctgcttttaacgtgccgtcactagctctggtagtgttaccagtgtcataaactcgtaaccatggaaggaatgaggcgctttctcttgccctccaccacataccctggtttcctcgtcccccaagctgaaagcagtaggatgaatcggaactatgagcacagtttatccccataaacacagcagtagctgagggaccgtcataagggctacttaaaaattggaccccccaccccgccacaccggccgggccataacgtaacgccgtcatcagaaccagtttacctgcgattttcaggccgggttttaccttctgaccggcctgttgccagttttgtttcatgtaagttctctcttaaagctgacgaaaacgacttctcagcgtaaaggtatcggaggtgacataacgttccatctcgcgcaatcgcttctcccctgcgctcagctgttcatccaccgcgttaaggagatcgctgctggttggcgtgttctcagcattcagctcaccttccggcataggatcgagtacaaacgacagcttttgcagcctgtgatttcattacaacagcacgatgctcgaaaacatgtttttcatataagtcagctaactcttgtggtgtcaatttcttggctcgcttgccaggaacataagccgaactcatgctacctttatttccatgccttcggctttcaagtatttttttaattttattaatctgacttccttttatatgcccttcttctaatgctttggtcaaaagagcttgttcatctttatctgccgcttttgatatgtctacagcaaggtacaatgggatatgcccagactcagcagcaataagtaaacttttctctggcatgggtatcgttgaagataaagtgatcaaaaaccactttgcttcagagtatatctacaacgcctataaagatgagaaaacctgcggtgtgctgtcagaagacgatactttcggcaccatcaccatcgcagaaccgatcggcatcatttgcggtatcgttccaaccactaacccaacctctaccgccatcttcaaatctctcatcagtctgaagactcgtaacgcaatcattttctctccgcatccacgtgcgaaggacgccaccaacaaagcagcagatatcgtgcttcaggcagccattgctgcgggtgcgccatgcatctatgtataattgggatcgtgctgcagcagaaagagcagatggtattcaaccgtttaatgcacttgctgtaggtggtgtgaataataatataactccagcaccagacggacaaacgtttgatataagtactgaaaaagaagtgaaaatctttaggaatatacgagcaatgcaagggattaacttaggtggcggtggattccaacaatgggggcatattcgttttacagacggaaatgctggagcgggtttttatgtgagtactccaagtggttggaaatttaacgcacttggatagaaaggaaggattaaagtccatgtcgaagatcaaaccgtcatactgtgcgtacatcgtgctctcgctaaacgattaacaaagcattactttatcgtaaaaggggatttttgtcgctgattgcgaagtgataacaatgagagtgattaagaactaaacatcgaaggggatcacaagaagagatggtgcatccgggaggattcgaacctccgaccgctcggttcgtagccgagtactctatccagctgagctacggatgcatcgggatttactactgtactgctcgatattcatatcacttcgaaagcaatatgaagtaatagatggtgcatcctcatgatgtttggagtgtatgacgcccggaacaccccatgaagcagatcgtcacttttgatttgatattggaaaattgtgcagtatgactgtattcaactaccgggtgggtgtaacgcaataaggtaattatgcgtaatatatattacctaaatatcacatcactattctttaccagttatagtaatcattagtgataacattcaatgaattaaagtacatacacatcatgactaaatgcaggagagatcattgcgataaccttgtttccagactcagaccagcactacaggaacggttatgtgatggccattagtttgttgtccatgtcactcactctttttaagaagatccgtccctgacactgctgtttgtcatctttctggcctgtgctacggggtgcggtcggttggtattataaaggagctgaatattaattaccgcaacacataaacaaaaacaccatcgggattaccgatggtgttgtgaatatcgtgccggaacttacttgccggaagggcgttttctgccggtagcgtgggtaacctgcgtttcgctaccctcctcaataaccactttacgcttgttagagagcttgtagttcagtcccagaatgtggcgtgcctgaaacgtggaaaaaatgttatgaagcatgatttctaaaaattatgcttttctagcaatacctactttgcgcgcctgaggcacgtgattgcccacttctgatatatcagcgagtcacctatattaactccagacgctgatttttcacattacctacggctctacttaaaacccacaataaacttcatgtttacataaaatcgtattaacagatacaatacccccctatagtatcaggagggcgtatgccgcattcacccgaagataaaaaacgtattttgacccgcgtccgccgcattcggggccaggttgatgccccgatgatccatcagctcgctgatatctctgcgctaaccgagagtattgggggtaaaacagccattgactgggcaatgcgtcaggaatttcgccgtgttgctggttacttgagaaagaacaaaccgccatgaacgtgatcacctgcaatctcgaccgtagcatctggcgcgatttgatgaagaaatccggcatgatcgcgctgatggacgctcaggcacgtgacgagtggtacaacagtctggagaggggtgacatacccgccataagtaaggctaatattgtcagtacctttgagcagttgcatcaaagcaaagctcatcacacactccttttatgtcagaatgacacgtttctcaagctttaccgcgaatctgccgcttctgcaagaggtacatgcgacaatagtgtgaaccttatcataattattcattaattattcttataagaagaataacgaaatggcggcgctaaatgaaagtaattaacaacttaacgtaaatcacacatttagccttccgtgctgttaaatcgcgttaaccgatcgtcaacgcaagcgtgatgctgacccctggaagctcctgtctcgaattgaaagcttaacctgctgtttttacttaattaactctgtgttttgacctaagctaaatcttacagtgagctatattcagaggaattaaggcaggctcaattaagcctgctggaacgcatactttcatccaatccttgttgccaggattcatgcagttttactgcattttcagttgtatcgcagctggcaggaaatgattttcccgctaatccccaggcgtgaataaagccctcttcgcatatttttttctgtccgtcagcgtagccacgaagatattcccctcgatcaacctgagggtcattaaaactatcggccagagcctggttatctttaaccggaacaccattcatacacttaacagctcactgaaatatctcaaaatgccaggaatgctggccagtgcacccgctggaataggtattcttagtcctgagactgtccgagtggcttcaggcggggcaagcattggtctgatgtctggtaaaaacaccgatataagtgccgggcaatcattcactgtcgcggttggcgaagctgttagtttgtttgcacaggctgcaggaatgaaaatgtatgcaggcgccggaatggttgatattcaggcgcaggctgatgcagtgaatgtctcagcattacaggacatcaccgtcatcagtggtcagtgcacacgctcatccttatactctaaacttaagatctccagacctcaaattaacaggattttatcttctgctgaggaaaataagcttttatcaattgacaactcaggccatatttttttgaacaacagcttcgtcaaccttattgatgattattttgcggcactaatgtcacttaatcaatattagttgaggtcatattaacatcagacctcatcgtttactatgatagattacgttttatgatacgagaatatttaaattataaatatcatcaaatgtaattttgtccggtttcgcatcgcggatctttccgggtcgtgaatgaaacagtcctcattaataaacaccacgccgggcttgtgggcgtcacaagcggctgcgagttcttcaacggtgtgtgcatcgttgatgtctctctttctaacccctctgcttgctaagtacccggttaaccctagccgggtgtagctgcataaatccataatgatcgttgacatggcataccctcactcaatgcgtaacgataattcaccgcctgcctgagagctcataaacagccatacgggatggaaaaaaatctaataaaacctgtgagcatgacaaagactttcaggcgaactcactaatctcggccctctattgtaaacgatcagagtttacagaatgcaaccagttgcgccaacctggttagagataaactaaaatcaaaaggtgagtacacagaagaaaaatgattgccagggtggagaaacagcattttttctgtggagctgaacgctttctctatcagagtacgttcttaagaaaacatcgacaagatagttccgcagctgtgttttccacctctcgctggtcccccaatatcctaacatccccttgcctgatgacaccctccgcaatgacattgccccgccttaacagcacagacgatgttgatcagcgaacgaattccagtaacactgcttttagctcactgtcgagcgggaaatttacccgccaatttatatccattaatgaaaaatcgaggtcgggatcattcagcatttccgttatgcgtcgtcttaagtaatccggtctgttcctggcattcctcagcacggttctgaaaaaagctgcataaagatcgctatgccatgaccagccgtcccccattccggtcacttctgacagacgttcctgatcgctaataagataaagaataaactgctcagcctggtcaagctgctcctgaactacgttgtcaacgtgcgcacctctttttctccctggcctatactttcagtctgactgactggaggtttctatgtgtggacgttttgcacaagcacaaacccgtgaagaatatctggcttacctggctcatgaagccgttcgcgacatcgcatacgacccggaacccattggccgatacaacgtcgcgcccggtaccaaagttctgttgctgagcgaacgagacgaacagttgcacctcgatcctgtcctgtggtcatatgcgcccgggtggtgggataagccgccactgattaacgctcgcatcgagacggcggccaccagcgcaatatctttataaagagtaggaagatctggcggtgcttcacctgtaagcgcactcagccctgcctcaacccccatgtcctgataaacgccattattcattgggggaagaggaagctttccatcaaaggactttccgggctgcagtttagcctcactccagacaacttttttcattgcatcttctgcgggtacccacggtccaccggtctcactccagccggctgaagacgctacagccagctccaggttcaactgtttcgctttatgagcagcaaatctgaaggcatctttccattccggggtcatataggctctttatatatagccatttttttaataacttcattagttggatgtggtaaaagatggttctgtgagttggttaaaatccatttaaatatagtacctttttaagtaggtataaagcccatgattgaaccccaatcagaagatgttattgcagcacaatacctgagaatgtcgacagagcatcaacagtattcaattgacaatcagcgtgaatacataagtaaatacgcagaggagcaggggatatccattcgttacacttatgatgatgcaggaaagagtggattaaagatcgctgacagacctggtttttcataatttgtttttataacgatttcttgtataattagggaaagcaaggggtggtttataaccaacccgcttgcttatagattgagcgaagtgtaccttttggaatatccttgcaaggatgtttcacagtcactttaccaatcttagaaggatgtttgaactgatggtggctgccttcaatgttcactataaaccatccttctttttttaacctcttaattacttccctactagaaatcgttattacctcctcgtatgataaagttaggttttttaggaaagggatttacctataaacccgtgagcattcgggtctgactcatctgcaggctctgatgaacgcatatcacggttttcaaatgccgagagcaacgtaaccggcagggcttcattgccagcaacacaatcatctgtctggtttgcatcgtaacctgctgatgcaaggttaatgggttctggaaccggtgttatatttttgtgtctggacgattgatgcatatcatcgtctattaaatctggggaactcttatccccggttttgtcatcgacttgctcgtttcctgccggggccccggggcttactgcagactgcactgggccagctcctgctgcgcccgtacccagtcattatccgacatgtaaaatccgccctgataggtttcattgagccaccccttactgccccgggttatcatccagccgttattactgcggatatcattactggccgtcatcccgccattcgcggtcacattaccggcagccgccacattaccgcctgcagagacatttccactggcagtgacattcccgctgaaattaccggtctgcccgttcaccgttgcagcattattgatattattgctccccatatcgatactggtatgcatccggttcagatcaggtttacccgttacgcgaagtttgtggaaaataaaagccagctgatgggcgcctgccgtggctataaagacattaacatgctggcgatccagctgctgaacccgggcggcgtactgctgacgttctcctgctctggcctgatgacgacagatttattccaaaaaatcatcgccgatgccgcaatagatgcgggtcgtgatgtacaatttatagagcagttccgtcaggccgccgatcacccggtgatcgctacctacccggaagggctgtatctgaaagggtttgcctgtcgcgtcatgtaacttgaaaagagaaatattgggtcggtacggttcccggcctgcgcctgacagcctacgggaatatttataccggccagtccgtttacgggattggtttcacgacaaagtctgaaaccgaactggaacaaaaaatacggatggtggaattcgttctgccatacctccttatggatgagcgaaaagaaaaggcctttatgatttataactatcctgccgtggattgttgccacagcctcgttttcaactcggaaacaggcatatatggcattgccacagatcgctttgcgtcacgtcaggaaacgaaagcattcaccaccctggaagctcgttctttcggtgattaagtgactcagaaaagtgcaccagagctgaagcagcttttgttacaaggatgagcattatactcatggtatgtctccgttggttaaggcggagacaccttcaccgctatgcggggggttgtccccgcatgggtgagttatcagtaattgaatatccgtcgcaaaaaatcaggcattgtcgttaaataccggaactaacaatcccagcagagttcacgccagtaatccagcccacgttcagttcccagcataaagccatagcaccaggcgttagtgtcgccttcagcgtcagcgaaaaaaatgctcaacatggcggaatggtggatctgccttgttatgccgccagatgaagtcgagcagatagcccgttttaagacactcactgacgaacagaaagcgatgctgctgtctgcaacaaaacttccgaggaagtatacagagggcgttattttgtcccgaaaagttcaggcgttgtttcgtgccgttccccccagtctctatctggcacttggtatgaccgaaaaagaggaaaaagcggaaagacgggccattatgaatgaattaaattgtccggagcttgaggctgcatttcatgtattgaataacttattaaaacgcggagatcataatatttttgacgattcagtaagactaaataaaaaaggcgatttaattaaaggtttttctagtctcaacgaatatgcaaacgttgatttaggcacgaaaataagcggattggatgatagcttttatatagtcgatctcaatgctttagacaacaagctgcgaaatggcattgcacattataaatatgaatataaagagtcaattcagatgataacctactatttcgctaaggaaggaatggaacgcactaaatacaacgaacttagtttcatgtcagcaagaagcgccctggcaaagatctcgaccgtatcgatcgtaacattcttaatgaattgcaaaaggatgggcgtatttccaacgtcgagctttcaaaacgtgtgggactttccccgacgccgtgccttgagcgtgtgcgtcgactggaaagacagggttttattcagggctatacggctctgctgaacccgcattatctggatgcctcacttctggtatttgttgagattactctgaatcgtggtgcaccagatgtgtttgagcaatttaacgccgctgtacaaaaacttgaagaaattcaagaggccgttctccagcaggaaacgtaacacttcataaaatggcttacgtcgcttgccggtaaaggaaaggcgtaaaaaatgatagcggacacgctgaataacattcatcgcccgtgaggggcggaaacagttctcagacactggccacctccattgcaagcaattcatcttcatcaagaggcacttcaacatcccccatcagtggatcgacaagcccttcattcagccggatcagaaggtggatacgacgactgataccgccgttattaagccagtactgacgtgctgccgcagttccctgagagagcaattgcaaaccacatcaaaaattgcaaagctgatcggaatacaaccatattcatttcaacatgaccctgagatgccagccttcacaccttagtaaatatcatccgctcgccgcagaaagcgtgcgcacaggcgcatgcgtcgaggaagcggaattactgcacacttgaaggatctggtgacgctccacagctgacaagggtcaccggtggtctgaagtatgaatacttcactaaagtatgcagattattgactgtggtatgtaactgattagggtaaggggagtgcaatggaatgcattttcctgtatagactaaatacatgcagcgtatattagtcgatttcgaaaatctaaaagacaactttagtaaaacaccgctccctgctttcaggtacactatacctctttgttccacaaacatcaggcataccatgaccgatttaattgcacgtccccgtcgcctgcgcaagtcacccgcactgcgcgccatgtttgaagagacaacactgaccttaaacgatctggtgttgccgatttttgttgaagaagagatcgatgactacaaagccatcgacgcgatgccgggcgtgatgcgcattcctgaaaagcatgatgtaagatcttaacgtctaatgtaggatgttctattcaagccagagtgccaaaataaaaaggcccgatcttaccagtcgggcttctttatgtcggctttcagtgtcgcctgtaccactgctaaaatgatttgtccggtcaggcctgtgtcccatcatccaggattcgattttttaaccctcagtcctcctagtgttatcttgttttgataagtcactagtaatacatgaatatttttaaaagcaaattatgtattacgattaagtaatctaattgaataccctttcttttgtttattaaaccaaattccacacatagtgtctaccttctctcaaatagtatagaaaccgactaaaatccaatatcagtcggttttccgtaaaaaaaatccgactaaaaacatcttttagtcatgtttatataataaaatgaattaaataaaaaatcaaataattcactcaagaaagaaatcactgtcccctttcacttgaattctcatcgtccgattataaaaattattacctcaaactttcaactttatccctaggttataaagttgcattctattatagttatatactagaaataagaatggtgtatgttattctaatactgacttttttggccgcattttttgcagtgtcgaaggccagatttttccattccacagggttaaggagtttcttaccctgatgttttaaaatctcgtaccagctgttgccttttaaaaaatccacacccgattctttggccatttcaccgggctggcctgttatatcatccgttatgctgcccagaccgctgtccatgatggtatgaagtttttcggcgatagtttccctaaaaggggtccctaatcctgaaatataaaatgcatcataactttctcgaggagtgttttgctgtatgcttgggatatctgagagatgagagtattcttgatcaatatcaaaacgctcttgctgaagcgcttgaacatcagggggagtttcggggctgggctgcagcaatgctttataaaagtgagctgtatgagaaatttgagaggaaagacagggacctaggtatatttaagatgaaagctgttgatcaacttgaagattggtacgcttgttctggtggtgagatgttcagtacagatacagaggttcagaacaggctgaacgataagctaattgaattcaataaaacaataaaatccgggcgagaagatttttctgagcatccagtatattgtgatcaaggtaaattctcataacacccctgcagttcgccaaagacagtttcgaaaagtgatttagtttatcaattcaggggcaatttgtatggctatctgacattacgctgcgtcacacatctaaggatgtgaaacccggccactcttcagtggccacatatctaatttttttgttgccataaaacaccgtcccctcgcgcgccagcacatccagctcccaacgttccggggtaataccctcctgagccaaatctaaacgaatttttggtatgcgctcgcgttctgctagagcatctgacttttaatcagagggtcgaaggttcgagtccttcatggctcacttttgttttttccgcgcggtcgtggcggaacggcagacgcgctaggttgagggcctagtgggggaaaccccgtggaggttcaagtcctctcggccgcatcaaaaaaatcttaaaaaagtacttgcatttgaaaatgtagtatgataagataattgagtcgccaaattacaacgacgaaaaaacatcatgaataagcgcccgtagctcaattggatagagcgtttgactacggatcaagaggttaggggtatccagccgttgaccagtaccggttcgttttcgagggtcagcaacatatccacagcttcttgcgccgcgctggcttcgatgtagcaggtgatcagctccccttcacggtgctttttgaccaggtacttccatttccagccgctttcgaggttttccagttgttgatatttcattgcgatctcagtgttaccgtgtaactctgttcagaatatcagttttttggcaatctgctgaaaagaaatcatatcctgtgaaactccgcaggcgatccgcatgacgaaaacccgaatcctgattgggcagattgatgaatgccagtgcttccaggtcgtaatcgaagacctggcctttcttgtcagccagcttcaggaatgcgtcgtacagctgatccatgttgtaatcgctgtccttataacccatctcttccatacggtgttttaccgccgcgcggccagagcgcgaggtcaggttcaactgaacctggttcagaccgatggattccggagtcatgatttcgtggttttcacggttcttcagcacgccatcctggtgaataccggaggagtgggcgaacgcgccagccccaacaatcgccttgttcgccggcctccggagaggccctggctgtcgatatggggattcccatatcgcttgtatggtctgtttgcggcctggcctgatgcgactacgcccactaaaaatggggattgtaaggcccagatgcttctgtaaaagtgaaggctacgcccaaggaaggcgaaaagaagctaatcacaacatggaactatataaaaactaaaaaaatatgaagtagacggttttattgttgtttcactaccttaaaaaggtgtttctatggctacctgcccaaattgtttcagaactatcaccaataaccattgccctgaatagctggaagctgcaattggtaaaggtgacggtgcaacggtatttgcctatcacgtcaatgaccctgagcgttatggcgtggtggagttcgataaagatggcacggcaatcagcctggaagagaaaccgctggagccgaagagcaactatgccgttacgggactctatttctacgataacgatgtagtggaaatggcaaagaacctgaagccttctgcgcgcggtgagctggaaattactgacatccaccgtatttatctggagcagggtcgtctatctgttgcaatgatggggcgcggctaaggtcatgccagtggtcctgattaataacctcgaactgccactacaataccgcagatgatgcaaaggacaattacccaaagaatggctggcattggattgccatttttagcttcagatgccaaatacgcattaaactcttttttactttgtcttcgaccatgagatgtagagaaattgtgctgccttagcggaacagtaccagactcaacatattccttagctgccgctaatgtggggacaggtccaaaatcataagcgccattagcatcgacaataagcctcccagagttattttttatcgcttcaagctgttcggccagcagaccgttgaacggcgcggctatccagtttgctatcgtcgaaaaaaaatagccgaaaaccagcagcacggagataaccgcaatcggccagagcaggtagtctagccactgtaaccagtccggcacatagctcatcagggaagggatccacgtttccagtctggtgaacagccaccagatggccccgcccatcagaataatgttgatcagtaacggcaaaataacgaagcgtcgaatgcccggcagggagaccagtttccagccctgagaaaagtaccaggaacgcccgcagtggacagctaatctgttattttttctctttttttcaacttgaaagccgctatatctagctgactcaatcccatctgctcctggacggcctttgcagctctcgcaatttccgtcacatccagtatctttagggtgctgatgagctttacgtaggaaagacaatattttctgtgctgacatattcggtcacgctgatgatccgtcagctcatgctgctgcatcacatcaagccagctactggcagccctgtaccatcgaccagcttttgtgaaacctcatcctccaacatactatagcccgtcgcgccgcggctaaaaaacaggttgtgcaattctggtcactgacaataaacaggatcttacaccatgttatccacagaaaaatgggataactgggaataactgccactactgtttcaatttacagccttgacgtgcgatgaaaatcgaattttcacacaaattgtgcctaacttattggcacaatctgtggataaaaccgacgctgttcgatctttcatcagcaggaggatctttgatgtgacgatcgtcacgttaatcgcctctggcacccttaattccaatctaatttacattaattaatctggattcgttttattacgcgccttacagcgtggggactccttttgtctggagataggcaaatgcaaacacaaaacacagtaccagatggcatattttccgctctcctggagcaggcagtaaacgaagcacagcgcgacctcgcgacacgtttctcttctcgatttgacgggcttatcgcgcatatcagcaagtctgagctcaatcgtacccagattatcgagttattaggtcaggagtcggcaaatttgcacaactcaattttcgattgagcaggctaaccactgttaatcgcgccttccatacccttaacgatcaggtctgcggcttcgaaccattccatatgacgcagcagtatatcattgaagccaacatgacccattgattttcgagaaaaaaaaccataattatagttcttatcacgcgtgttaaaccttcggctaacccattgattgagctatatcaaatttgggttttgataacctctttttaacaaaattcacttaggaaactcatccctaactcattaggtcgtcttgttaggtttgtcatcgatagtttctgtatgtttgatagaaaataaacatcagccttagaattagttattccatttctgaattcttctggaagagatatatcttcacacctagctcttgcaattaaatgtccgtaaccaatagaacaaaaaccttctgaatcattgtaagctgtcgacctaaaactttcccattccttgataaatgccttacccatatcagaaacggtcagttcactgatagcactcctactttcagtatcattattttcgttgcaaaatgtgttgttataaccttctctcaatatatcaataggatcttgtaaatcattacgtcgttgaaatggtccacgcagagttactttacagccgatcggatagccctgacggattttgaagcctgcaacagatttgcgtgctttggtgatcagcggtttttgaccggagattgctgtcaggtcagctgctgcgttatccagcagtttcttgtcagcgatcgcttcaccaacacccatgttcagggtgatcttctcgacccgagggacttgcatgacagaattgtagttaaactcagtcatgagtttgttaactacttcgtctttgtagtaatcatgcagtttcgccatcgtactactccaaattacttggcagattcttatatgcaggccgttacaacggatgaggtactgatgaatggacaatctgattcggaggggcaagtattacagtcagaagaccagcaatatcaactaactgaactggcgaaacaatatgcaaaccagttatggctggttgtcggtcatcgggcccaccgtctctatttcaatgtgattcctgctgccactgatgaggatgtaaaagatttttgtgcgcaggatacgatgggattccatcgtatctttaaccgtatttccggaaatatacttccgggcgaaaaactgaaagctttgtaacgcgtacgatattaatacctcgaccagatacgatcggcttttgcctaactcggggcggcggggcatcagaataattttaacgatatcatggcggttttctgtcaggagctttttgatttttttagtaatatcatgcactgaggtatcaaaaagatgatcgtgttcgataatttcatgcgtatagataaacgtttcatccagatagcagacctcgagctcaggcgtttcatgttcgcttaataaaaaagagggctgtaagatgtcaaaattccaccctctggcacatctgagatggcggcgtgccagacgggagaaaatcagcgctgagacgatcaggccgataccgttcacaccgaacagcaggctgaactgcatggcgctcaggccatactcgttttgcatcacaaaggaggatgccccgatataggcgaacagccccgccagcatgaaggcctggatcaggcagtagcgcataaagcgacgatttttaagtaccgtcctggcggtttgcgtcagcgatcccctgccctgtttctctgttagggactcgcggataaaaagctggctggcgatcagcagcgccagaggcgatgacagggttggttgctattattccgataatagtagcacttgttgtcgctttaggtgttgccatttataaaaattgggacgacatcaaacaatggaccattgatgcatggaatgcaattggggaattcttagtaggcgtatgggatggaattgtacaatgggcaagtgaaacctggaatagtattagtgaatctacatcggaagtttggaattcgattaaagaatacttaatagagttatggaatgggatagttgagtctttatctgaaatatggaattctattgttgaaacattactatgcacaacgacaaccacagacgttaaaaaaattcaaatggcgtttagatcaaaaacagccgtctcacaaaactaagtatgagttgatatttgaaaaattttcaccagctttgttgcaaatgtatacccttgaaaaccctttaggtatagtgaatggttttaactataaatatatgagagagtttatttataatgaaggaaagatacctaattatctgatcgagaaaaaaacatccttagctaatagccgcgcttttaacatccaaaaaatattacgggatgacattagctctgatggttgaagggtcgtgcaggaacatgccgtccagttcgtccagattcatcagcagatctttggcgcgctcgtaataaaccatgccgtcctgcgtcaggctgacgcggcgggtagtgcggtgcagcagctgcgtgcccagcgcgttttccagtgcctggatctgtcgcgatacgctccccttcggcaggcttaacgtctccgccgcgcgggaaaaactctccagttccgcgacccgaaggaaaagctgcattgcgtgtattttatccatagatgttggtcattgttgttaagacgcgattaacataccgttttctgatgataattgtgagtcttcattttttaaccaacttttcatttttgctaacattttatttcgtctcctttatatatcgattttaagaatctactaaaattagaacttatctatttaaatctttaattacttattccaagaatttacgtctgcattgcttgatgcttttgtgaatcgtgccaggatcgtatcataaccaccttggattgctttccatacaaacgggccaattactaatacgataatcaccgctaacgcgattaacataccgttttcattcttgtacgttaatacagcatgggttttttttagagcatcatcgatacaagacgcaattaatattttgaaagccatgattgatattgattcgattagttctgtccctataaatgatataccgattaaaaacctttccgcgttaggagtcctcgcagataatatggcagattttgtgcctctgggggttgccgcatatgtgacacaaatgatggcaatattatttggtttctttattatatctagaaaaaactccatcgaaatgtttacatcttcgcgcttgggctaccatacatggtgcgtgacgatatcaagccgatgatagcgctggatttcatcgcgcgtctcggctatatcttgccgtgccatgacgtcgtccacgccgttggcagcgattatgctctgtgcggtgatggcagcatcgggcaggtaaagcatcaaaagcacctggcagcggcgctgcgaactggaaagcacagatggaatttcaagcgtcgtcatcatctgtcgggtatccagtgtgaatgtttgataagaatagctaaaggatgggcgctgaaaagcgcaccggcaggcctttcactcaggagacctgctaattttccttttgtatgtttaaaaagagacatccactttaagaaacggagagctttttcttccttaaaaacatatggaaaatcttcagatccttcacgttcaatatctcttaaaaatcgcttacaagcttgtttatgcttctgacaagcaacaacctcgccatttagtacatcatcacagtagtccagcatccattgtctgatcatgttatacgtcaaactccttttctacgtttgttttcggaccttgtttactatttggaatgacaattttcgctcttgcactcggacgagctgagacacattgtcgcagccatgaatgttttaaataaacgtgtaaaagcaaccatacagcctctcattagttgacgcccttaaaatgtttattattagcaacgcgaataagggcgtcttttaactaataaatgtaattatttcacatattcaacggtgaactgagagtcagcgttagctgtacctggcgttacggtcgtagaggttgcaatataacgtgcaatgaattttaaatcggccttagtatccacaatatcagttgtggcagaatctttgtataactcaaccttttaccgctttctatcttgcccctaaaggcgcattcaggttgaagggcgaacagattgacggcagttttctgttaaataatgaaacctatcttgtggaagcaaagtggcatagcactaaaacaggaaacgctgatctccatgcatttcatggcaagctggatcagaaaatttcatgggctcgcggcgtatttatcagttgggctggatttacaaaaagtggtctggatgcatgggggaggggaaagaaggtcatctgtgtcagcggttatgatcttgttctcatgttaaaaaatttattcgcctgccaaagcctggtttcaggcgacagcaacgcaggcaactggggaagaagagaaaacggtaatttagttctttttgactgggaaaggtttggcaaagggagtcctgctattgacctggctcccctcataaggggaatggggacaaaacaagaatttatagaccttgcagaacgctattgccagctatcctcccatcaaaatatcagggagctggccagagaaattgcagttgtcaaagcctggattgtcacggaagtgattgtcctgcttcatatgcggcgaaagtatagccttgctggcggaaaggttgatttttttgaagtataaagacaaccataaattcacgcgtaatacttccccatgaacaattatgcagataatgcattttctgcactacgataattgcgcttttaaggtacacccaaaacaaacaatccggtgagacagtttttctgtctcatttgggttgtttttgtctcgtcccggtgctatgttttcatcatctaaaggctaacgagacagttttcattattatggcactttacggctacgcccgcgtctccactcacgagcaggatctgctggattttgaaaacgtacgctatataaaatacgaagctgtagctaaagcagagcgaagaatacccagaggcctctgtaagatcgctgaatcactcaggacggatacaaccggggctttttttataccggtgctaactttacaaaaaaactttcctggggagaagttagctggatctgtgattatcaaaggtattgatatttcttttggtaaagaacgtctgaagtttaaaaccatgaatgaaagccagaagaaaaggcatctgatgaaacctcaatacaattgattgagttctgcgatgatattcccttttttaacttctgcaaggattccttcatcaagaaccttcagtttagaacctgtttcttttacataagcggcgtaagtctcattaataaatttttcttgtttcttcgatgttatttcgacgccttcttcagtagcactaatacttctttctaattcggttacttttttatcgtaatctttagttgctactctattagcaatatcatctatcattttatcaatatccgtttgatctttcggatgtaaccaaaattctgtagctatagtgccacgttgtctgcgatttggtaagagacggcaccaccaatgcctgcaacacctgccctgaagcgaggagtaccgttaaccatcactgtatgagcccatacactacccaccgttgaaagtccttcaacggtaaaagcgtaagggttgccagcgatacctgcgatattcagagcattcgttaatgtacctccgctcaagctcagcgcgccaaggtttgagagtgcagaactggcagtctttgcacctgttcctcccagttctaatgggatgacaccattgctgtctaccaaaccgaggtttgttaaccgtttctgttgaaataggataagctgttacacgtttaaatggtgaaactaagtgccatccttgtcctaaggtctccttttcaattcctgtacttctgttataaacaacacctgcatgtccctggtcaatcacctttacactcattgcagttaaaattccacctgttaaaagactgaatcctactactgctgcacctacgattttctttgtattcattttatttttcctccttgaacatgtttttaatttttaatactacgtttccaatacactcaaaaactcctaattcctccttctctcctatcacttggtggggctggaaccatttacttaattctctataaattactggacaaatccctatggagagcgccgttagtaggcagagctctgcgcgtgcctgacctctcaggtaagtggcaagttcaaggcttaacaaaaacggaggggggtaagccttgggaaggtgtgctaacaatcgtacagtcatgggataaggtccggattgttctcaaaactgctcaatcgcaatctgatagtgttactgcatcgataatttacgatgaatgcattggttatcgcgattaacataccgttttctgatgataattgtgagtcttcattttttaaccaattcttcattttggataacatatttaaattcccccttatctatttatttgagctatacgttacaaacatcattaatctaaaacttttattacttattccaagaatttacatcagcgttgtttgatgcttttgtaaatcgagctagaattgtatcatacccgccttgaattgctttccatacaaacgggccaattactaatacgataatcaccgctaacgcgattaacataccgttttggaagagagacgcatcaggatgtcagggttgacctgaatcagctgacggaatttcttataagaaatttcagccacttcacatgctgtttttgcacgaacccaggcgctacgttcctggccttcttcaaacaggcccagttcaccgataaaatcgccctggttcagataagaaaggatcatctctttcccttcttcatctttgatcagcacggccaccgagcctttaacgatgtaatacaacgtttccgctttttcaccctggtgaatcagcgtgctctttgatgggtactgagaaaaatgtttttaagtctttgtcaattttaatttttggtttggaataatagtttttagagtattcgttcaccatttcaactgtggtttttttctcatccattgagttagctactatatcaatggcgcttttagtatatgtcatttttggtccaataacatatatgtgagctttagtttttgaaagatattcattcagtgatttactcagattgagcagatcttctttagcccaatcgtcgtgcataaatacaacatcagcatcatttaatgctttattattgactgccagaagtttgaatgtattttgcatcaaaattgaaattattaattccttgtaaacttgcaccgagatttaagggggagtcaaaattaatttgcttattttgatatagcattgtaataccaaccccctgggctgtagtgttggaatcataatcgttcagggataatacacttccatttttaggtgttacgccagtaaatgttattgcagggtctatatctgaatcgcagttcatggaaatcgtaaaattattgcccccggcagtgctgccaacacctgtaaattgacttttattacatgcggtgcgcctactcaggttggttgggttgtgaatgacgatcgcgagtcaagtaaggctggtattaatgtcgatttcaacggcacaatgcaaaacatttcttactatcagtatggcgtaggtaaaaccacaggtggtgtgaatattggtaactatatgcttttcatcaaaaataagaaagtcaccattgatgggcaagagggcgacgaaattttttcaaacgtcgactggaatggctctaaatgggaatcaggcggtgcggttcgcagcgacggtatctccacttgtgaatttacagggtcagaaacttgaatttgcatcattgctagatagttatctaattcatttttcgcgtttttcgcttcttcaattttcgcttttgcatcttcatatttaccgctgttattaaactcttccgctttcgctttcaaatctgcaactttttggcgtaactcttgttcacgtttatccattccgtatttcctccttgttttggcacaaaaaatagacctataactctaacaggtctagtgcattttgtatttttaattgttcgttattatccttctttctccatatgtcaggaacgttttctcccttagctacaatgcgtcccacaatttcatgtccaggaacgagttgatcatgtccataattatgctgagtgttatttaaaatgaaatcgcagctgcataccccgcagacatcaatttcaatcaatacttcttcctgtcttggctcgtttaattttttataaacgagttctagaacaccagaagcagaaatctgcatagcacgataggttcttttcatgcaaaacacccctcagaaaatatgttaaacaaggctttaactgctgccaccgtgtcgtcgtttacccgacgagcggccggagaatatgtgatgacagtcacctccgggacgatgcctgaagcattcacgattacacccttagcccgtaatacaaaatttgcgtctgcagatgttaagctggccgcagacaatgccacggcaatggtaagcgctctggatattgttgaagacaatgcccttgcagatggtaagtcacaaaacagatttcgtgtgaccgttgtcgatgcgcagagtaatcctgtccccggtcagtcagtcagccttcaggcagaggcgacgctttaacgtaaacgcgcacaacatatgttccgattgtatggagcgccgtcgcccctgtccagcggcatgccacgcagatcgtggtttgcaacacttttcggcctcgtcctggtgcgttcgccgcatatacccctaagttgttaacccataagttaaagaaatgattcaacccacaatcattacctgatgcaaaaacgcgctttatggcgcgaaaacgctcattttattgacacagaccacacatttcgatttcgatatttctcgtttgtgctcgttaacggctttgtatacaccatcacatcgtaatacccggaactggcattgtaataatcattagcaagcactgtaagcgtcaaacgggtttgtcccttaccgatatttccctgaacattacctgaaccggatacgtttattacgtttgtattactcgacgtccattggatactggcctgcgacgtcagcgtggtgacaggctcctgaagcgtgaaggcatcttcatccgtcgttttcactacggaggtatcgaaactcacatcagcagtcgctttgttcagtacataagcaatcaaagctggcgttatgggcgacataccactggctaccgtggtaaagagggatgatctcttcaatccacggcttatccgccaccatcgattccgtaatgcgatgtatagccatcgcctgcgcactgatgggacgatccgggcgcaccagatggctcattgggttgactatctttccgtcaatcacgtcgacagaagcgacttccacaattccaccctgtaaatcacaggtttcggtatcgataacgcgcagcattgatcgctcctgatcctaaaatgcctagcctttgcttccacaacttcaatattgaagtatttttcagcttcttcaccacttaaccaggtctcagcatctactaattgctgaattacttcaatttcgatgccttctttcaagttttctttgtatacattcataattccagcctcaagattatccaagtcctctgccattttacgaagtacatttgcatttcctctacttacagtccatggtttatggaccattaaaaaagcattagaagggacaacaacacgatcaccagccaaggcgattacggaagcgatagaagtgatgagaatgaacgtgcatggcatgcaggggtcagttcgtgggtcggtcgcagtaatctaaacgatacctcaatagggattgagacggttaatttggctaccgataataacggagtatttacatttccgccctataatccagtccagattgatgcaatcaaagaactggcattaaatatccttcagcgctatccggatattacgcccgtgaatgttgtcggacacagtgatattgcccccggaagaaaaagtggccccggtgcggctttcccgtggaaagagctgctgatcgacggtaaagagttcgataactcttatacccgtggtgagcctctctccttccgtctggatggtgtgatcccgggctggaccgaaggcctgaagaacatcaagaaaggcggtaaaatcaagctggtcatcccaccggatctggcttacggcaaaaccggcgttccgggtatcccggctaactccacgctggtatttgatgtagaactgctggacatcaaaccggcgccgaaagcggatgcgaaaacagacgcaccggctgacgacaaagccgcagcagcattaaggtcttttgcaatggtaggaagagcaacgttggcaatcgcaccgtcaaggacagccatcgaaataccgatgacaatagtggcaattgccccgtacctctgcggtaagggcaggccatcagaaacgtttttttgcatgggaaaagaatgactcagcgtgaaattattttcagagtaactattttagcatcgttatttcggttttatgtcgcagatttgtaacgaagtaaacccagatagattgcagcacgcatcacacgaatttataataaaaaccggtatctcggacaagcacacaaaaatatctgttttggggttaagaatttgctatgaatgatgacgtcacaacccccctatgtaatacgggttgtgtgaccccaaaaataaaggggttaaatctatcgaaaatacaggaacatcaagggttttcaggtcttttatttgtgtaaaaaaagtgttttaaaaaaatgagaaaaaaatacactttaaaatttatggagaaaaccatgaaagaaaggatactaattgacgagtttatttctttgttacgctatcatcatgtaggaaagcttctcgcggggaaaaaattactgtcacaggcgtaacggatagccgtattacgtatgtccgggatggatactcccatgagtgtgttttttctgagtaccggttccgaaatgaatttatttaccttcctgtggaaagccgggattggcaggaggcagtaaaagcaaatgggcgtaaaaaagtcgctgctttgcgatcttctctgccgctgagtgttggatctgacggatgggataaggggctgaaatgaagaacgcaccgaacctgaaacacctgccatttcgcccagaccaaacgggttaccgatggcgacggtgtagtcacccacgcgcagcgcgtcagagtcggcaagcttaatcgccgtcaggttcttcggatcctggatttgaatcagcgcgatatcggagcgcgggtctttaccgaccactttggcatcgaatttacggccatcgctcatctgcaccttaatggtgttagcattatccaccacgtggttattggtcaccacgtagcctttggctgcatcaataatcacgcccgagccgagtgccatgaatttctctgcgcgcaccagttcgtggtcatcaacaagaaggacgttgatcaaaggaaatgtctccagaatagggataacgctactgactgctaattgggtttatattaacggttttccatgcaagattaaaacgctaaaaaatcggctatacgattctggtctcgtttttggaaattaggctgtacagcaagtggaaagaaaacccttgtccgctgggcttttaccgctattttctagcatcgatattcaaaaagttactaaaacagttgttaactcaaacgaaaaagatatcgatagccatgtagttctttggcgtccgcaaagcttcgctctatagttgaacagcgtactttgtacaactttttccctgtaactgttagtttgttttttttaacgatatccttatatttctaccatatatgatgagtgataactttttgtttttgtttctttgaaaaacatacctcacgtagcggacaaacagcgcagtcttctgggttggatttatagtgacgatatccttcacgatccgttgtcgcatactctaaaatacaccccatcggacaagccgacgccttccgcaacgcattcccttcccgtcatgtcgctatatatctgtatcgctttaataatgctatagtcattgtcgttagcaacaaagtgctcaactatatcgcggtcaagcttcaatccatcaacattaatctgtcggatgggtaacatagcgtaatctctggaaaagcaatcatccagaaacagccgacacccctcggcgcgtaaacgctgaagagtgacaggaatatttggatcctttgtcacatcaatcgcttcagctaattcaaagacaagtccgctaaaattcagccagtgaactggcgactacagattgaaataagttgaattgctaacgaaagaaagataccgaaaagaagcgcttacttagtaagtaatttttactgagctagattttaaccatattaactttatcaatatatcctccattatttttccgtcttccggatatagctctcgataaaggttattcctgactaaattagcggattattaaccttaccattcaggttacatgcttgatgcccagaagtgctggagtcaaggcttatgtaaaggtatttgatttcgtgatcgtggcatttgccattttcatggcgatcaaacttatcaacagacttaaccgtaaaaaagaagaaccggctgctgccccgccagaaccaactaaagaagaagtcttactgactgaaattcgcgatctgttaaaagagcagaataaccgcgtttaatcaggcgacagaaacagaaaggccagtggtaaaaaagcgattagcttgcttgccactggcctcccagttaccccgttgtgcatgtttacctttacgtaaataactccctaaaaccgagccacacgcacggtatgatcatgatcccggtactgaaagccgtccagcgacgaccaccaaagaccggcaccataaacgcataaggaacgcgcagcagtgcgcctgaaagcgacggcaacgcggtcaacataaacagctggtcggtggtaaaggtaaagcccacttttggcaggttaaccgcaaccgcactgaacaacatccagacgcaaaacgccagtaacagacatggaacggaaatccacagattacgacttgctacacggtggccgcgcgaaatcctttctcggcgtaggcctgtcggtcgcacaaacgtttggccagctggctgccagcgtatccggcaaaaaggccagcgccagcaagcggctggcctctctggcgctgttcctgctgacctatggcattgtttacgccaatccggatgtgctcagcctgattgaaatgttctgcggaccactgatcgcggtgatcctgttccttatccctgcgtacctcatatacacccgcccctcgctggcggagcttcgcggcgtgacggtgtttctggttgttcgcgcgggatatagtgattcgaggatgtacgctgaataagggatccgggatcacgctggggagtgaaacttcaggtggcattgaacgcgtcctgatagaagataacgcgtttaacggaacgggcgtcgggtttcgcattaagtcggcccgcaaccgtggcgggtttatccgtgatataaccgtacaaaatttacgtcttacggacgtacgttttccggtgctgatccagctgaactggtttccgcagtacagctatggcgaccagagcaatttatctgatctgaaaaaagagtataagttttcctctctttgatcccatcccggaattaacacagccgtatcttcaggtaaataaagctcccgggcagaggcttttcgtatatacgcccagaaccaaaaaatagcacgtgaattaaccgcccccttcaaccactttaaatcgacgtcttgtagacatgaagaatcttcaccatgaagacttttagttttaacattgcgtttttccccggcctgcatattttgcattaaacgcttaaaagcttcatcacccctggtggcgggtgtgggggtcataactggatcgccaccgccggtgagctttccacagttattgacaggactccgaggcgcggcagagccgctttttaaggtcaaaggctcaacggccaaaacctttggaacgatgcgccattcggctgtacgggttacacggacacggtcagccccaaggtgaggggcataaataccgaccaccctctcgatatcttcctcgtattcgttgacctcatccgtcaccttacgggcgaccctgacggcctgagcatcacgcttaatgtttgccagatacgcggatggtcagctgaggatatttctcagggtgttccatcgcatcgagcagcatttcacggttcatcacgttcacgttcaggtgctgaccaccttcgatggacgcttcgtggtggaagtaaccatccatcagacccgcgaggttagttttacgcacttcgtcgtctttacccagcgcgtttggcacgatagagaaggtgtaagagataccatctttcgcgtaagcaaacggcagtttagcaacggaggtcagagaggcaaccgcaccttggcactgtccgaaacaaaaatttcttttgcggtggtgtcctgtagatactgtgattttacgctgcgcgttagggtctcgatctgctgtttattttcctgataaagagacgcgatatgcgatatctgtacctgcggcgatttttcccccggcaacaccagtggaatttgcagatgattaattttttcaacattgtctggttggggagaactacaggctgttaatgtgctgagggttaatacagcgaaaaagaacggcaggctcttcatcgaatcactccgatactggaatataaaaccaataaaaacgggatggtaattaattgcctttttgagaatgcatgattaccgaatgccaggaaaaaagcgcttacccattgctcggaaaacttggttattctgttttttttaggtatgaggagttctattttttgtattgcttttgttttcatttttttattataagcaaataaccccagaaaaaggctggcaacgcttatagctgtggtgatgataatgaataaattaccaataaaattttgcatttcttgaagccgtaaaaacgttttaaacacgcttattttaaaagtgtgatttaagactttaatcgcctcttctcaattagatactattagcgaaaatatttatgttgttattgagagagtgagaaaatgtttaaaataacggtctgcttattaacgtttaactccgaaagaacgttgcacgatgttattcctcctcttttaaaaatagcggatgaattcgttgtagttgattccggaagtacagacgcaacgatatatatttgccagagttatggattgtcggccatattcattcaaacttgccccaggtgtggatgttaactatatgttgcacacaaccgccaaaaacgactaacgtcattcgttattcttataaagattgcgcgacatcatgttgcgcaattctgacctcccgttgaagaaatcagcactcgatcaaattttgaattttttttcttaattattgacatctcttccaggccttacggcacgaggacttagccttttttaccctttcacaacctcaatttaacgtcaaaatcaacccttgtgctgaaaagattacttactatcttttatattaaggataaaaagctgaataagtctgaagatgatgcggcgccggatggcgttgtaaacgaaatgttacttgataatatcaacttcttctatattaccagcgtaaaaaaacatgcgtggttaattaaggggctggtgttgcctgtaatgatgtgtgtggctgtcccgacgtcctgatatttctctttattaaaaaatcgatatttatctattactcgggaaagtgagtaatttactcaatacgtaacaataagatacgagaaatttatttgcccgttctagatattaagtactcaactccattatgagaaaaaagtaaagagaaccaccaatctggaactgctgaagttaattttttatcagcattagctcctaaacaatgttgaatgagaccgagaataagtgtcttaccgactccgttactactgccttctttttctttagagctatcaccaatgatcaacgttagtcctgtatcattgaaatgcactggatgaaaagttggctgatcgcaagttaagcgaattaacttcatttaactttcctagattcgattgcattccgtctgctgaaactatcagttccagcccgttctaataactctttcttgatgcggtaaaatgttgcacggcttatatctgccgccttcattatgtgtgctggttttacgttttgtgcaagcatctcgcgaacgatctcacgggcctccatatctttttctttccccgcatacaaacctgccagttttgctcttgcgataccctgcgcttggcgtttacgccgagtttcataatcttgtcgtgccattgtcgcaaggatatcgcctgtttatcgagagccgagaaggtaggcaattaaggtttctaactgccgagaagtctgaacacgacgcagtgatgtccatgagttctggtcaagtgtccgctctcagccttgccttcttcctctcgctcaacaaagtctattctcaggtgcctctaatcctgattgatgacccgtcgcaatccctagatgaagtcaacattgcatccttgaccgatctactccgttgtgagctcaggcattgccagttgattgtgtcctcccacgaggacgatatctcacctcttcctgccctgcctcacaaaaaagattccctgacaaaaaccgacaaaataacgtgatctaaatcacacattttgacattgggtcgggtatgctggaatcaccaagacggaaagacaagaggtaaaatttatgacaatgaacattaccagtaaacaaatggaaattactccggcaatccgccagcacgtcgcagaccgtctcgccaaactggataaatggcaaacacatttgattaatccacatatcatcctgtccaaggagccgcagggtgggccagcatgccttcgtcaatttccgtattcagcatctgggttacagctggttatatggcacgttcaatgatttcgatggcacatttactttcgacgagaaaaaccctgctgccgataaagtgaacgtcaccattaataccaacagcgtcgacactaatcacgccgagcgtgataaacatctgcgcagcgctgaattcctgaacgtgggcaaattcccgcaagctactttcgcgtcgacagaggtgaagaaagacggtgataaactcgctattaccaaactggtgaaagagaatgaaaaaacaattgaaaccatacgaaaagaatctcaagtagctaaagagttggcagaaaaagttcaagaaaacctaaaaaataatacggtaaatattattgaagctaaaaatccaccaattgataatcttatagtaggtaagacgttatggagagatattagcaacggtaaaccaggtattttaaaagtgtggaacgggaaagattgggagcttcttattcctgatgtggaatcaattaaaaaagatacactggagcaggcaccaaaatgctttcagaacccatacattccgcgggatgcttaaaaagcatatgtgcagtacaaagaatctgccaagtaatcagatcaatatattcatttcaatggcgcagacagtgggccttcaatcacttcagcctctccgttgtggcaaatatcatcacctcgcgtcagatgccagacaccgtttattgtctggcccgtttcaagatcctcggtgacgccgtcggtgtagtaagctacctgaactacgccgttatgctgtatccagtagaaacggaaccatgacacagccattggccggaaaacatattttgatagtagaagacgagcccgttttccgatcgctactggattcgtggttatcctcactgggtgcaaccacgtcccttgccgaagatggcgtcgaggcactggaaaaaatggccagcatggcgccggatctgatgatctgcgatcttgagatgccgcgcatggacggattaatgctggtagaaaacctgcgtaatgaaggttatcagacaccgatactggtgatctcggccaccgaaaataaatgaatgacttcactgctgatgatatgcggtacggtgatatggcgaaagagcagatactcgctcagggaaaaatgaacaaagttgacatttgggggcaggagtttaaagttaactttttcaattttgacaagactattgatgagcattttaagagcatggatagtatggggtactggactgcttggggagaatattcaagtcttataaatatcatgctcaaaaagtttaaagcgaacgaaggtggggttttaaagcataatcttttgaataagcgtgtggagtgggggaaaaggtagagataacttcaaatccttacctatcactaacaagggagtcatggaaacttaagttcatattgtgtaggtctaaaaggaagtgctcgtatagggtgtattaaagatccaaatatctccatcgaagcaggcgtacaagaatttaaagatgttttaggaaaggcaaatggagatatagcacttgctttacagagttacaattgtgcgacacgttcctaactgaaaaggttaggcgctgattcaatattcagcagaacttgcgcagtgtttcaggattgctgtagtggatttgtcgatcagagcgttaacgtgcagatcgttaaagttcactttaccggcaccgccgccaccgccaacgctcatattacctggctgggacgcgccccaggcgaaggaggtaatatcagtccagccggtgtggttagaatctttagattcgcccgtaacaccctcgaccttcagaaacatatcaatagccataatatctactcttcgtggatgaacaatattgctttcgaaaaagcccttatatcgatatgttcatgaatgccgatggtagaacaaaattctttgattttatcctacctatcgtgccatttatggatagcagaaatgcttttaggatactcaaacacacaactccgtctcttgataaatcaagggataaccatgtgaaaagaattgcccactacatcaacgatatgcgaagcttacttaatataataaatgaattcaacacattcagtaaaatagttgacaactctaaaaacaccataaaactttttgcacttgtcttttataaaaacatgcctttgaatcatatcgacataccatccaactatttgtgacccttgaacctcaacgcggtattgaatttctaatttgaacaaggaagctattttctttaaaaaagttaacggatccataaattcatcaatggtcatagtatgaaaacccgcataatctgttttcccacgtttccatttcatacctacaagagccatatcaataaattcgtttactgttttgccttctatcctttgtggttttataatgcctgatttagcaatttgaacccaagctcatatcgatagccatgtagttctttggcgtccgcaaagcttcgctctatagttgaatagcgtactttgtaaaactttttccctgtaactgttagtttgttttttctagcgatatccttatatttctcccatatatgatgagtgataactttttgtttctttgaaaaacatacctcacgtagcggacaaacagcgtagtcttctgggttggatttatattgatgatatccttcacgatccgttgtcgcatactctaaaatacaccccatcggacaagcgtataatttcagggtattcgctgaaatgcttaaagctggtaagccctgttcgcccggtgtgaacgaacaggccattgcatttttcttttctggctaactcgccaaactggcggacatgttccggacgaacggcactggcaaatcgtttagcctggacaagccacctttcctgacctgtccagaattgcccatcgataccgccatccccgctgtagctgtgattacgtctgaccgggataccccgacgctcgatggcggtcagggtcatctcttcgtaagtaaaactgcacaaatcaaactgcaaaacaacaaaccagcgacgaacgtgaggacaaattcgtatggcaatgctataacccttaatgccaaccaaaatataatgccccaggaaaacgtatgctaagaaatattagtgtcagaacgttcattgtctatttccttttatgtgtatttttggtaagtgatggagttatagcgctattttcacggaattcttcgctttttattgcagtcataattgtacaattcatcgcattatttttactctgggagaaaaaggcgaccagcgaaataaacagcttgatctgaaacgatactttcataactatcacgcgagatatcaacaggtcggctgaatatatcatcttttaaggccaggatgcccgctttgcagaaaacttgtgatcccttgcacagcgcagcctgtaaaagatttttccgaaagtctcatcctcttaaggttaaatgaataaatgttatttctttgttcagctaagaaaagaaaccataaaaaccacggcaataaataaggcataaatcacattaactttttcataggcttaacgcagtcataatcgatgggtgtcaagctggaagcggataaactaatatatagtgaaaagtcagcgggcctggcgggtgcaaagcaatgcttcagtactcagctaaaatgcggtaaacggagcaggcttagatatttggcctcaatttcgtttacgaagaaccagttcatccctataccctcctaccagttttcatccagtcatatttggcttttatagctcagctggtaccgaccggtaagcgatacttgggcagcaaaatgttatcaggctggagagttcaaaatgatacggcttggcacgatgattatgtaatctttgctgaaagaaatggagatgttcttttttgtgatatcaaaaatataacctctccagtttatggtagtatccaaaaaagaaatttcataatttccagttccttagctgactttttggattctttttgttctgccattgagatagaacaaagtaaatatgatggtgatgttacagctgatgattttaattttagagaggactttctgaaagatatcaaaccggcgacgacgccgcttatccgcagcctggggtttaagcggctgttgctgattaacggtgcgttgaatgtcctggcgttgctggcctgcgcgtttctgacgccgcagacgcccgcgtggctcgtcatgctgatcctctatctgggcggcgttttccgttcgattcagtttacagccatcagtacgctggcttttgcggatgtgccatcggtgcagatgagctatgccaatactctgttttcaaccgcaacgcagcttgccgtggggcttggtgtggagtgggggaaaaggtagagataacttcaaatccttacctatcactaacaggggcaatatggagacatgagctcatcttgtattggtgtaaaggggaatgctcgtgtagggtgtattaaagatcccaatatttctatagaagcaggtgtacgggaatttaaagatgtactaggaaaggtcaatggtgacattgcactcgctttgcagtcgtacaactgtgcgacacgttcctaactgaaaaggttaggcgctgattcaatattcagcagaatatacgatgcccgcatcctgaaactcggctacccagttctttctgtaacaaaaaaagagatttctctcttttctgttcgagctggtcaatttttccaaccagctccggcggcgttgacgctgccagaaagtggtggtgggggaaggattcgaaccttcgaagtctgtgacggcagatttacagtctgctccctttggccgctcgggaaccccaccggacttgatggtgccgactaccggaatcgaactggtgacctactgattacaagtcagttcatctcccacgtcgatcacgttaacgccggggataaaggagacgcccatggtgacggcttttctgccgttggcatggtagatgctggcaggggaggcatccagcccgcgtgacagggtggcaatatcccgtaagcgggtagccgccccaacgcccggcggggtcacgatgagatcggccagctcgtcaatactttcgaattcaccggtaggatgcagacgaattgactcagtaccggaggggatctctcccgcgctggagaccacgttcagccttagcaaccaaccctgtcatcgcccatcctatacttgttataacagcaactattggcgctaaagccatgaatgctcctgcaattacaccaatagcaactgcgatagctgccaaagtagctgctaattcaggattattggaaatccattcagagaatttagagacaagatctgctataacttcaagaacaggctgaagagcaacttgtaaatcttgcatggcttgttgaaatttaaccgctggagatgcatctattttagaagtagcaccctgtacggaaagcgggtcgccttcgccattctatttaagaaataatgaagccgtcgtcgcggttgaaaataaccaggccgttacgggccagcagatgacatttacagctacgatattccctgtgcttaatgaaagtgcattcagtaataatgccgatcaaacaacgctggaaagcgatttaagctggaaaatattgcaaaataatccataggcaatgtggtgatgatatcgtaataacgttatctttaagcgttgcaggattgttttatcacgaatgtgctttacatgtcgcggatctatcagaaaagtgaatggctgaaacaggggtggcaggagagggcgcttaccgatccgctcaccggtctgcctaacattcgtgcgctggaagtgtttttacagcaccatcccgaagccaaaatctgctgcctgcgcctggataatctggaatttctgagccgtcattacggcatcctcatgcgtgtacactgtaaaaagatgatcaccgcgtcgctgcaaccgttattgcaaaaagacgagaagctctttcagctctgacagccttaacaagtacagcatggagttcgccaacggttaaatcgcgtatcacaggttcaggtatgccacgtatcctgcgaatcaagcggcagataccaaagtaatctatgccctcggtgctaaaaagaaactcgttttcagcgagggaaaaagttttctcatagccatcttcttcagtgacaagcgtaacgccaaacgctgcctcgcagtcatcaatcagggcatcgccatccatgccgcatatatcaaggtcggcttcgattagaatattgaacgagggtgatagcatgaaagaaaatctcttaggcgcaggtatggtattgctaagcgtcgcgatcgtcgccagcttcctgaagatctatcttatcggttgattcagaacgaaaaaaacccgctcattgagcgggttttgaaattcttgctgacgcgtctgaattacagagcgattacgttagcagcagaagggcctttggcaccgttagtgatttcgaactctacgcgctgaccttcagccagagttttgaaaccattagactgttattgatattgttctggttgagaaaagttaaggcttaagggtgctgaatatttcagacacgcatgtccgtggcgtacaatgtttttttatgtaggtatttgtcaatgtcaagaggcgaggagtgcgccaaaaggtgaggctctgataaatgagatgctgccggtagtgagatacttctgtggagcggaaattcacttcacaaaacatcagaatgaggatgatcgcggatgaagtggctctgcaagccgcattctacaagggttgagttgtcagccccatcatttttttaaaggctctggaaaatccttgactgctctggtaatggaataaatacgcaatatccgtcaccggaatcgacgtcattctcagcataatggcggcacggcttaacctccgtcggagaatatattcacctaaagagagccgatacttctctttaaaccatgtttcgatggttcttctgctgtatccaatatctgcaaccaaatcaccaatgtgtaaaatagtaaagttattttcttctacccaggagagaataaaagaccttcaatatatacaagataaagaggcctactatatctctcgtatcaagtcgaacacacgtatgtatcaaaaaaatcctaaccctgattattttcaagatggaagaattaagaaaggtacagagtatatacagatagatatagagacgttaatgaactcccttcaaccaggacaaacgtgtgaagtagctgatgcttatgtaggaatgaatgataaagtgccagctcgtgtaattgttcatcgattaacaaaacaacagcaacaagaagaatcaagcaggcgatagaagctaggaagttcgaattaccagagtatctaattcctatgctgcagttgttaaaaacacatacaacattagaagcagtcaaaaaggcgcaaatatatgctggaagacatcttcgtccgtatgtatctacacttactgcggaattagaaatgtatgcaggatcggatcaaccatttcgaaactttgcagcagccttaaatagtccagaagtaaatacctttacgattgcattgcaacaagcgcaaaaaacggtggatctcttccggcagactgttgtcgatgccgatgtcaaacaaggagcggtctagcgcctgagccagatggatataaagctgatcggtcagaccttgctcatcgctgaagttcatcccggtttgtgcccggaagcgggcaatcatacgcacgatggcgcgacgcaggcgctgatcctgctggtgtttatccatcaccgggtcgggtgtgcgaagcatcataaacagcagcgccaggaacagctgttcatcgctgtgcgttccctgggggagatggacatcaaatcccatatccgccagccttacggcgatggcagcagccatcgtggttttacccacgccacctttgcccatcagcataatcaggccgtgttcactgcgagcgatatcattgaccaggccagagagcgatatgttttcaggcgtgtactggatgttcgttaccgggagcggtaatgcctcagaacgggtatccagcagtcccttcaatgctgaaacaccaaccatattgactggctgtagtaatagggtatcttttacggtctccttagcgccttatgcttaagactgcgctttaccggatttgctttcagctgttaatcatcgttaccagattgttatttggcttaccgctcagctcacgaggagaaaccagggtacagagctatggcgccttgcaggtaaacgaatgaaatatcagtgaaacaacagcaaatcagcgtttttgcagtccgaattattcaaacctgtatatcactaataactgtcctgataacttcggtcaataccatcacactgttacattaaaaagccgttcatatagtgccattgttttttcagacaaataatatgatatgggtgtttttttaattttaacataatcaatcgaacacacattgttatcttcaaggaatcattttttattgttagcgttttaccactaaatgtaaattttactttactgtatatttcattcaaattgttaatcgtatttaaatcatgcttaccaaaaacatcaacaccagaaacttttttatacacccacagtttatgatctaccccattatcagagttgccgacagtttagttcgccataatattgatggtgtgattgcgaccaatacgacactcgatcgctctctcgttcagggaatgaaaaactgtgacgaagcgggtggattaagtggccgtccggtacaattaaaaagcaccgaaattattcgcgcactctccgcggaattaaaaggccagctgccgattattggcgtgggtggcattgactccgtcatcgctgcacgtgagaagatggctgcaggcgcatcgctggtgcaaatttattactctggtttgttaccagactgaacgaacgcttccagcagtttgatacgcttggtcagctttttacgcttggtttcggagttggtttcgttcagctcttcgcgcagagtttcacactcttgctccagatccatgctcttcagcagggcctggatagcttccgcacccatcttcgcgtcgaattcgtcaccgaactcttccagcgcgtccagatactgttcttcggtcaggatctggttacgttccagattggtcatcccgccttcgattcaagcgataactgctgtctatcccataacacaactgcttctttcaggtccccaacaataaatggtgctttaccatctttatctgtagcaattgtcttattggataaaacaataactggctttcctgataatagcttacgtgttggatttgttggatctggttgaagaagtgggcgaccatctttatcttctaattgatctaagtaattgaatccatcttggtttgtaataatgtttgctacagccgagaaagctgggtctaatgtgatcaagcgataactgctgtctatcccataacacaactgcttctttcaggtccccaataataaatggtgctttaccatctttatctgtagcaattgtcttattagataaaacaataactggctttcctgacagtaacttacgagttggatttgttggatctggttgaagaagtggacgaccatccttatcttctaattgatctaagtaattgaacccatcttggtttgtaataatgtttgctacagccgagaaagctgggtctaatgtgatctatgacattacccagacctcagagggattgcctgtcatgataagcatctctcaaccggggagggagtcagctaatatgctcgtatcctatatgtccgatggtggctgtggagatgagaaggtgcggcttaatgctaacgggaaggatgtgcctgcaacttatacttgtgtatcagtcggagcagacaggattgaacactttgcagtgaatgatgcaagcaaggtcaatgagatggttaaccacctcaagtcagatttcactttgtaatcttagacatcaaaattacctttacattaaaaaacgacacaaatgctgtgtcgggtatcagtacaacaattgtgaggcgttttgtccagcggatctttgataaaaagtgacaaaagtcgcgttaattttcgctgtccgatttttatcctttacattttaatgtctgtgcattttttggccgatttagcagaaaaattcagttaaaactgaaaccgcatccaggcaaagtaaacgttaccgttgttatacgtacccggtatgtaggaccttttgtccgtagcgctgcaaaagatccccaccaaacatattgactaatttctgtaactgcataatctgatagaccgtcccgaagaaaggggacaagcctgccatttttagcctctgtcggcgatgacctggatcaatcgccctggacggcttttatctatttgaataaataatcacgattaccgacatttcattcaccctgaacgtaattacttttccttatgttctgatggtttttttcatttatagcgccaggactgaaaaagtagggttcaacactgcctttattcttagatattttacaaaacaaatagatgaacaatccttgccataagagcacagttgcaccaatgaataccacctccgtaactaaccatccagccagatagcaagcaatagactgaaacaacactactatgaatatctgaagcagatttctcatcgcaccctctctggcatcctgttactgcttatgtttatcttgatattcttttgccttcttcatcagttcttcaggactgtcagcccccgtcaagatattaaaattcaaagagttattaatgagtaattatctgaaaatccggttttgtaccttttcgttgcttgttagtttaaaggaacaaggtaaagtgtgtgctacggcgaggatgccaacaggataacgacttaaggataagggtcaggagcgccaggaggcgaagactcaggattgtcaggacgaccggcgcctggaggcgtttttaacaggaaacggaaccgtatcacggacggtagtagccaagggataaacagggtttcatggcggttgtggcgaagtggttaacgcaccggattgtggctccggcattcgtgggttcgattcccatcagtcgccccatttttcttaaataaattaatatgcgggtgtggcggaattggcagacgcaccagacttaggatctggcgcctttggcgtgggggttcgactcccttcacccgcacttttaattaaataactcatacatgtcttgcggaagtagttcagtggtagaatacaaccttgccaaggttggggtcgcgggtcggtgtgaagtgggggaaaaggtggagatgatgtcaaaaccttacctatcactatacggtcctggattcattagctatgcattagcaagaggtggatattcagaagaaacagctattgcgttttctagggagcatgctgatgaaaatagagctggctgttctgatccaaataacttccgaaccaaagtcggagcgtgctatggggattacgtgcgcccataagggggcaaggaaaaacggtgattgcaagctgttaggtcaacccgttccagataaccactgatctttaatgctctgataacaaaagcttcgaaagttgagtagctaacaaacttaatgctaagtatttcaaaagcattgtaaatgtactgatctgattttctaaaaagcgatgctaccattcccgtaagatatctgctgtttatatcaatgatgtgggttaataattggtagtgcagcgcgccatcggagtaaattcttttttgttctgccagttctaaaataaccttttcagcatcatctatgtaaaacggtgtgaagtgggggaaaaggtggagatgatgtcaaaaccttacctatcactatttggcgaaggttttattagttacgctttagcaaagggtggctattcagaagaaacagctattgagttttcaagaagtaagaatcatttaaatccaggtggttgctccgatccgaataacttccgaaccaaggtaaatgcgtgttatggtgattttgtgcgcccataagggggcaaggaaaaacggtgattgcaagctgttaggtcaacccttggtcctgttactccggttagtcccgttggtcccgtatctcccgttggtcccgttactcctgttggtcccgtatctccgattggtcccgtatctccgattggtcccgtatctcccgttggtccggtatctcctgttggtccggtatctccggttggtcctgttactccggttggtcccgttattcctgttggtcctgttagtccggttggtccggttggtcctgttgctcctgttattcccgttactccgatcggtagagctgtagtctcggtgtttcactttctcaggtaattaatatgatcctggatggagtggtttcaatggaaatgaagccggcagctgataataaaatcagggggatatatgaccggctgatgtcgttgtttgaatttcacaacattaatactgttgatatggctaagatgctttccgggtatggtattaagttatcccagttacggcatcctgataaatttattgacaatatctccatggatatgcttaaagagatagcagactggttttctacagcggtacgatcaacgtcaaaaatacggacagctttccggctctgttatataccaatgtccttgatttaccggacgatcagggtttaaaactgatttccacccaaccagtggtacgtctggagcctggccagacccagcagcttcgttttattttacaaaataaagaaccgctggaggctgagcactataaacgtgtgacgttcgagggtattccgccgaaaagcgataacaagaacattaagatcggatttaatcttcgtcagaatataaccgtattaaagagatgaatttatccgaagacggggttctggtgatgcaattagaacaacgccgcctgctcatccgggtcagaaatattgatgacctggaaaagatatacaaattacttgttaaaactcaatgatttatcattatagcatcggctatatattgcattattcttgaaccagcaatatagccggtgctatatctccactgttaattgacttatatttattaacgatattttcacgcataaatctaaataaacacgagctaaagtagatgttttatctcgtatggtagataaacaaaaagagaaaattagggaacttcaacaagcttataatcgtgccaaaacagaagaaggtgaagcgagtcaatcagcgcagcggtacgctgaacaaattcaccgggcaacaggtgaactgaatcgatttgaaaacgaattacgtcagtcgaaccatgaattagaacagcaaggtaatcgtttattgaattttggtaatcgtatggagacattaggtaatcgttgtaatcaatcaatccgctttgcaccgcataacgcatgatggccgtggtgcgctgttgaagacgggaggctacttcaagacggccagatatctcgacggctttaatgggaattaacagatcgcgggtactcagttcagcaatattgcgagtaccaattgccgggaagatattgtcctctaaactcttttttacgcgattagcatgatcttccgaccatttttggttggtcacgagccactctctggaaaccttatcgaaagttctgggattcagtgttaacggagtggcagggccaaatgcgtttgctcacggaggtggtaaggcaacctgttgtggcagtatcagtgggaaaacagcggaagttatatggacattaagcaccacacgtgctcagtacgatgcgggtcttcgtaaagaaactcgtcgggttgtgatgccaatgccagaaagaaagtggggagagaatgatttgcatgttcactttttgcccggggataaggtgttgctgggctggagtgataataaggctttaagcaattcttttttgactaggttaataataaaaactaacacttttagaaccctccttgcttctgacaacatttttcgcttaaatccacttttatataggcaaggaggtctcttttcgattgataatgaataaaaatatgaaaaacggtttcgataaatttgatgaaaaagttacatctcttgtacaaaaaggaaacgagtttcacggcaaccaaaaatacgccgaggctttaacccaataccaaaaagcctagtctggctgcagcgttcaggaaaaccatccggatcgatgctgtcaggaataccgcagatgttcagcgcactggcggtttgcagtattccttcaatatccgacatcaccgaaatgaacccggtctttgaatggatgctggcaacaaggacatcaaccgtaatagcaaaagccgtcataaaagattccttataaagcatggaaccctgccctttcgggagcggagtcccgtgggagaaatgagtgtaacgtacacagcaatcagcccgaacgggacgggagctactggctcatctgccgggatccacggcagccgatactgcgtcgccatgcccctggcgcctgaccatactgacgcttaaagctgcgattgaaggactgctgagagtcaaagcccagcgcgatcgccacgttcagaatcggttcatcgctgtgggctaagcgctcaaccgatttttgcagcttttgcgcgcgaatatattcggcgagaggggagccggtatgttctttgaaaagccgctggaggtgtggggcaagttatcgctttacccggttttgatgccattaagcaggcgctgcccatgattcaggctctgctggaaatgatggttatcattgtgatccccgtgctgctgatgttcagtgcttacgaacccaaatcggttgtcactatctcgttcgcactctttgccctgatgtttcttacattctggtgggaacttgccgggtggctggacgatcggcttatcactattctgtataccggcctttcggagcagggaatgggcaagataataatgacgctaatcagggcaaataaaccacacaggccttcgaaacggcgaccggaaaccgtctcaggatcaaataaaaggtgatacagccgctgacgggccgacgtgaataatcgcgacacattaacctcgaaaaataagggctgacatcatgtcagcccttgcgattataacgggtctactttcaggcaggaaaccgcatgtcggaaactgccctccagaaccggccgtgtttttgcacattccggcccggctagctttagagcaataccaaaaagcctggcaagctcttcctgaaccaaagctcgaatctgaatttgccaactggatctctgcctgcatgtacagcgcatattttgatctcgcggattacgctgaggcaaagaaatggggagagacgacattacggacacgtggatcggatatagacactgcacccttaatcgatctcggcatggtctgttatgagttgaatcaattcgaggaagcgtataaatattttaacgatgcttataacttttattttcctcttcactcgtaagaacatatgaatcagcaaacaattttctcaatcgttccgtttctttttgcttacgctcatcaactttcgtaatgattttctcagttaattgatcgtattgttgaccaagtgtttgagcttgttcagttgtcattacttcatgattcagtttaatttcagttaacttttgtctaataccatcagataacttaaaatagtcgccaagaacttttttagtcgatgaactaatttctccggcacaagaggaagaagaaggcgaaacgaagaaggataagcctaacttccaaacaacgaaactcaaaggttcatttattgagcgtgattttgacgataggcctaaatttacagctgatgctgatgaacctacatttacaaaagctgtgggagataattggtttaaaaaggtgtatgagaagcctgtagtacaatcaccagcaggaaagtaagggggagcaaaagctctctcttttttattaacgaggaggaaaagccatgaaacaatgacaggactatagggcaacgggttgtgttcatcttcactgctgagcgcctgtctgtaatgggaagaggcataaatacagagcttaggctggccagacagtgctggccatcgggtgtagctcacaataccagaaacaatcgaacgtactgatttatccgtttcagtgaacgagcctgcctttgcaggggccactaaaatgaacagcattagcgccagggggagtcggagcaaagcgatcaagattgcatttctcatcagttaggtctgggtcaaactatgaacaaaaacagaaaaaattattgtgacgttatttagggggatctacaatgacacattttaaacaattactttaatatcaataaattggatcgtattactgtgttcctattattggtttagctcagcttgtcgctcacagcggaccttcagctcgatagcaagtccgctccgttggagtgccagatgcgctctaaatttgatggctagtattgaagagatacttgggcatcatggttatgtcattgatcctgaaggtggccttcaacctatgctctataaagatggaaatgatacaattggccttacgttcaatggagagatttataattatcaggaattacgtaaagaacttgaggagaaaggtcatgaatttcagaccaagtcggatacagaggtattactacacgcttacttagaatggcaagaagattgtgttcaacacttaaatgggatttttgcttttggtatttgggatgaaagatttgggaaattgatgctctacggttcgacagctggtgagggagccatgaagcagactaatcaaacgatcagtgtcaaggatgccaacaatgtgttgagggtgcagatcgggagaatcacgggaacatggtaacgggaggcctcttacgggcctcttttttcaggaggactggatggcggaatatggtgtccagacatgggacgcctcaggcaaggtaaacaactatggcgttaagcctgtcagcgtttgtggctatcttcagctggcccagaaccagccagcctttcgcggctaatgacatcgccagtggcattcctaaccaccctaacccgacaatcgcgacctttttcattacattctccgcttaacgatgcctgttataaggctacgccagcctggtggaacgcacaattcataccatcaatatgaaatgaattaatgatcaaaaaaagcccttgctttatggcgtacaactggtttaggttaaaagacatcaaatgcataagcattcaacgagaatttatatgacacgcgttcccctttacgggcattcacgaaatagtccgtgctgccgcggtggaaggttttgtccgtagacggaataaagaaatgctctgtacgcccggcggaggcgcgcgccagatcaccgcgatcgtcgatgatggcatccagcatctgacgataatgtgcggtgatatttttgacgtagctcatgtccttgtagcgcccttcaattttgaaggagcgtacgccagcatcgatcagcgcaccgaggttcgccgtctgatcgttatcggcttattactgaaaatccagcagaactgatttttgatgtaatgcctgatagaacctatatggcagttatagatgaagattttgatattgataaatttgtggatatcggacaaggcactttgaaatttatttgtcccatgccgtataagttaggaaatgagcaaacggttgattttgaaaatgacggtcgagggttaattgcaaatgttaaaaacaaaggctctgtgcattcaaatccgattattgaaattgatattaggcttattactgaaaatccagcagaactgatttttgatgtaatgcctgatagaacatatatggcagttatagatgaagattttgatattgataaatttgtagatatcggacaaggcactttgaaatttatttgtccaatgccgtataagttaggaaatgagcaaacggttgattttgaaaatgatggtcgagggttaattgccaatgttaaaaacaaaggctctgtgcattcaaatccgattattgaaattgatattaaatctacagtatttgtatacaactttgttttgaaagcctctaacatcttaatgacgtcagtaacttcatttgaatttgtatgaattgtatcgattaaatcccctattccttctttaaggctcatcttatctttcttttttacagtatctactaatgtgtcgtaataattttggaattgctcatcataatttacaatattacgagctgttttttgaatgtttggcttcgctgtatctaaccagtaatttgcattgattccacaagaggaagaagaaggcgaaacgaagaaggataagcctaacttccaaacaacaaaactgaaaggttcatttattgaacgagactttgatgatagaccaaaatttacagctgatgccgatgagcctacatttacaaaagccgttggtgataactggtttaaaaaggtatatgaaaaaatagcaacaccaccagcaggaaaataagggggagcaaaagctctctcttttttattaacgaggaggaaaagccatgaaaggacgcaccggtattcttcggcggtaacaccgacgcgaaaggtatctggaaccacggttccccactgttcatggagatcgaaccacgcttctccattgataaactgactggtaccagcctggcgtttggtccgttcaaagagtggtatttcgcaaacaacgacatctacgacatgggccgcaacaagtccggtcgccagagcacctggtatatgggtctgggtacagacattgagactggcctgccgatgagcctgtcaatctacagtatttgtatacaactttgttttgaaagcctctaacatcttaatgacttccgtaacttcatttgaatttgtatgaattgtatagattaaatcccctattccttctttgaggctcaccttatccttcttttttacagtatctactaatgtgtcgtaataattttgaaattgctcatcataatttacaatattacgtgctgttttttgaatgtttggcttcgctgtatctaaccagtaatttgcattgattcattggtaaaaatagtatgtttaattgctaccaattatattcaaattattccagagatgaatcgccagtccattaatagacaataaaatcggttaggcatgcaaaaaccagcacaattagctaatgtgtttatcctgtgctaagtggccgttttgcctgagaggggttgacatgagttggcgtatccagtaccactaaaagcatatcgcattcacctggagcacgattcatgattcgcacccttcgtttcaccggtctagccctggaagaaagtgataaagcggatccccgggccatcgacggtgccacaggattcaaaggagtgaatacgaccaataattgacattgcggtgatatctccgaatttggcccatccgggggcctatgtagatgcacagctcaaaggctatgtcgagtctgttttggctgttatccattaagtatagatagcggacaaaagagactgatgaagcgagggtgttaaaaaggccccacttgcgtggagcctttattgtccacgctcacaggcaacgttccgcccattaccgccagcgttaacgccacagcataatccacctgcaacgccgtatcctgccagcagtccggtacgcaggaggcgatcttttcccccgcaattagctgttccaccagatacggcggaagttccgagtcacagcgctcacgcattcgttttagcgcagccagcagttgcttgcagagcgtggcaaatgtcaccgcatcgtgcgtttccaccagtacgctcacgtatgccgtgccatcgttaatctcgatgacctcgacgccgtgatgatagtcgctcatccgtttaactccgtggttaaggggtgcgactattttctgttgtgtgtgagatgcaagaaacgtaataccgttggaggggggatagtacaacgcgcagtgagcgggtgaagcgtgccggaaaggtgattgagcgtttttagcgcttaatcaagaataagaccctaaaaattaacccgcataatgcgggttttttgttaatcgttcgatatactgggtttgtataaatttctcttgttaattgggaaactgttcgaattggatatcttctactatcataattcgggaacagagcaacgatatctaatacagttagtgttaattctcttctaaattgattataccttacccaatctctagaatccggtccccatacacgttctaatcccgtattgtaccagcgtacagcataatctgtatagttgccaataagcctagttaaatcattataacgactattgatagtcgactatcaatagtcgttataatgatttaactaggcttattggcaactatacagatcatgctgtacgctggtacaatacgggattagagcgtgtatggggaccggattctagagattggataagatataatcaatttagaagagaattaacactaactgtattagatatcgtttctctatttccgaactatgatagtagaacgtatccaattcgaacagtttcccaattaacaagagaaatttatacaaacccagtatcctgcatattctcattattgatgcatttaggtgccaaggtatcgtaggtgctagatgcatctaatgatggatttcgggattgtgcctttatcagcagtgtttcaatacttttacaaagttctattgctttacctaacacgtccattcaattactccgtaatactgtaagaggaggtgagctgtaccaatgtggccagccaataggggttatccgtttggtacatcgtaccgcttcttttgggattgtgcatgatttgatgtgcgtgacgacgccaaagatatccagatcgtccgggtcgggataaattggcgaccaggccgcgttcacgtataggaatttggaaccatttctgctccggattaagctgactaaaatttaatcaccatccgatttgtatgttgccgggttagtctgcatcctgcactatggttgttatttgtgctttttcaggtcgttttatgtgctttttacaaccgactggcggatctttcctgcatcaggccgggatatattaaaaatgtattactgggtagctttagggagaaactgctatgctttaactaattgaataaattgacaaaacgaaagcaatcaatgagttaataaaatcagcgtagcttattcaggttgtactgttctttcttgttaatctcttgattttcttgcatctattcgttactcagatctcaaatggggcacagggtgaggaaaacgatttcaaagcgtcagcttcgtgttcatctcttctatccatgtagcatagatttatttgtgtactattaatagaaatggacacaccagtctggtgtgaagttgtaaggtttaatacatatttatattgaatgagctaatattgctttccctcaaaaataattccacattagcaccatttagcaattcatttttgcaatataatttaagtgccttgtcaacgaagtaatatatatttaactgaactatccgcattagcatcaatatagattgcaattgtttttgttgtactatcgattacgggattcgttgcgggcatggaacgaaccgcataatggaaggatcaccgcgccggacctttaacggtcgttctgttgtcgtagatggctgcaaatgccagtgcggttgtaaagtcatttcgagtgcgcagaacagcacggtaggataataaatgggctgggaaaggtcgaaagcaacaacgaaggcattacctccagaaccctcttttgtggggtggcttttagctggaggtgttgccgtctttgtaggcgtattgctgtttatacttccgatacgtgggccgatctctggcttctgcttaacctgacgcaggccagagtgacgcaactcctccagtgcagctatcgcgatttacaggaggatgttctggtattacccgcacataatgtatttgcggagaaacgaattatcctcagccccattgcacgcgttatcatcggtcagcgtcgcaggcgatatcctgatgacatttccctgttccagagccattctccgcgagtcagagccatcgccaggcctgttacgccagcgcgagctgcgacccagtttgattggcttagggaagagtccttcactgatgagtttgtagaaccatttatctgtcatttcggtataggtggtgatgaatgccatatcgacaagctggtcgttcagcagagcaggtgatgtattcatgtggatatctcctttacgttgaatgtgaaaaggaggaatgactggttctcagtgttgtgttgcagccttcctcaggggatggaaggccgtgtaaaaaattaatgatgttccgggaatataccagtacccctactaaatcatcaagtaatttagtagggggattaatctattcatttttctttatatgtaagcgagatattacaaaatctcccgaagattcgacttttgtagtttcatttcgaatatattcagaatataggcaagtgacgttgggataattaaaactacataatatcgcggctaatatatgtggttttggcccaaatggaatgatggaaacgttataatcagatcttagggactgtgtgctgggtctttttgccaaacgtgatattcacgtttacacagaccgggtctgaatcatacgaatcaatagccacattctcagcccagtcctcgccgatatattgcgatttcataaaaaaatcagcatcgtaaaattcagcgtcggcataacggggatcggctgcatgacgtaattttttcatggtgctggccgtaacgaactcatcgatttcatttccctgttggatgggataacgatcattgttcactaacgtaggtgcttttgtggtggtcacccggtcgccaaatacacgcttcgtgaatatgagtgatggcgtaaataatctggtggccgagctgagcgccaataaagcgcaggtgcttacggcctctaactgatctcaatagtccgtgggcaaacggttgatactgaccagtttgccccggctcatattgatgtagttcccctgacgcagcgccgccagcacctccgccacgaccgaccgagaaatacgagtgctacgggaagggcgcgacagcagctatacttttcgggtcttttcacctgcgtttgatgcagaccagggcaatggcataaaaaccatcacaatttttatttgcaggcgctacaatcgaccgcagtcacaattctcaaatcagaagagtattgctatgaaaaacatcaacccaacgcagaccgctgcatggcaggcactacagaaacattttgatgaaatgaaagacgtcaccatcgcggatctgttcgcgaaaaatgccggttataatattttaaaatcgggatattaattaaaaagggaataaacatatcttgtttattcctttctaactacacgtgaacatggaatgttgtgttgtggattaaaggagtgataattatgtcttgtttaaagaaaaccttactgaagtccgttattgctgccgctctgttttcagctcaattctcgacgtatgcagcaggaatggttcctgaaaccagtttactggtaatagatgaggcaacgcacagcggtagatggtgtttatacccctgacgtaataaagagaggtagagctcgtccataaactcgctgaacgttagccctcctccctctacgcgtttgggtttgtttcttctccagttcctggtgtaccaccagccgcatccacagttgcattgataattgcattaattacgtctgaagttgttgataaaaatttacgagcatccacgccgtcccaatattgatctaatgtaaattgttccccgtaaacttttactacatattcagcttctctgtttgaatcgttctagttgggagggctgttagcaatttgctctccgaccggataaccgcaagaattttgcttttatcaattgccggataatctggcatggtcttcaaccgatactgaactttttccatcagttctgttaccgatgtttgcttgttgtttgcttcttcagccaatttcagtagaaattgataatccgacaacgaaatatcatttatcaccgggaatactgcaatcatttcatctggcagaggtgatgggctatctcggctgggggttgattgacattctcagctcgcagggtgacatgcgcaagcgctacggcgtggtctacgtcaaccgtgaaaatcacgacctgaaagacctgaagcgcgtgccgaagaagagctacgcgtggttaaaacaggttatccatactaacggacgcgagatgtaagccgtacgctgccgggccgtttttgtgactgattaatgggaacactccgctatgtctgaaacagagccattagctcagttggtagagcatctgacttttaatcagagggtcgaaggttcgagtccttcatggctcaccattttaattaatatgcgggtgtggcggaattggcagacgcactagacttaggatctagcgcctttggcgtgggggttcgactcccttcacccgcacttttaataaaataactcatacatgtcttgcggaagtagttcagtggtagaatacaaccttgccaaggttggggtcgcgggttattggcaggcttgcctaacatacaattattcactgtttaaaatccacattcctgctgttagcatcaggtccatttgatcaatcaataccattcgaagggaatcacacttaatgaaacctaagctgtattcgtacgtgcgtttttcatctgtgaaacaacgggaaggtaactccctggaacgtcagcaagataccgctctaaaaattgcggcccgttataatctcgaacttgatacaacggctttccacgattgacccgtacgggattcgaacccgtgttaccgccgtgaaagggcggtgtcttaaccacttgaccaacgggccgttaaattaaatatagcggcggaggggatcgaacccccgacctcacgggtatgaaccgtacgctctagccagctgagctacaccgccataaatgatattaatataagtggagcctagcgggatcgaaccgctgacctcctgcgtgcaaggcaggcgctctcccagctgagctaaggccccgagtgcaggaataaaatcaagtcgttcatcaccatctgttacacaatagcgctgaaacttatctgtttcaaattgttcggctgattcacaagtggcggttttgacgtttaatgtgtgcattctggtttcctcctcattgggttattacatcgttcgacttcatcactgagcggcgaagggcaatgagcagctggcaggaaggaaataaaggagcgcgcagcggttatatacccctttatttccttcctgactattgctttttcagaaacacctaaatattgcgccattgtatgaagttgaaaaccaagaatagaaaaacacaacgtaatcattttcttatttgtcaaccccgaaaggaaaatatcaaaatcaaactcatcacttttactcctattcgtggcattgaataatgcttgataatccgggaagtaattaacaaaccaaaaagcatataactcattacttaccatgcgaatttcaacacgtaactgataaaattcacccagtgcggtcgcaattggctttggcgtacgtccctgaccggtccaggttttttcctcaccgttcgcgtcaataaaacgatatttcgccgcacgcgctttacgttttttcgtcggctgacccgcctgcgccaggtcactgcctaacagatcgctcggagaaataccgtcagctttcatcagttccagcagagcattaattttatcctgctgttcagcgcgttgacgctctaattcagcctgctcgctgcgtttaaaatccctttacaggaaaatgttttagacgcttctgcggaacgcatagactggacgctcaacaatttctccagggtctgcgtttccttttccggtggaaaagattctaccgtgatgctgcatctcgttgcccagaaagcacggcaattaaagcgaaaaatagatgtcatctttctggactgggaagcgcaattctcctcaaccattcagcatgttgacacgatgagaacgctgtatcgggatgttatccatgcgccgccttttcttatgtgcccaacacggcacgtaatgatcatctattatctgcaccattgtaactttcgttgtactgtctctctgctgtacgttgaacgctggcagattcagcggaggggataccatgtcaaaagccacgaatacagcagtcactaagcgcaacaaccgtaagattcacgcccgtaaattcctggcaacaccagaggggaaagcctggcttgctaagaagcaggaagagcgagaggaatatgtaggaacaaagcatcattctatagagttaggatcagatagtttaatagagcatttattaactccaatgcgagcgcgtgatctacctggagttggagaattagaaacgtctctttatttgttatttaaggaaatgaaaaaagatgcaacagttgcactttcaggcgaatccgcagatgaagtattctcaggatatccatggttccatcaagagaagtttctagatgcagagatattcccttggagtgtcagtattttctgaatgtgacatcaataaaatgtttgtgtaaatattaaccacttcgagtaaaaaaacacctcgtaacaaaagaacaatgaaattgattcacaatgttatattcagacattttcacttgaaattgatagttcgcgatagagactccatttatcattactttcgctttccttaaatgaagttcacatgatcaccctcatatctatcgaccaacatttattcaataggttttataatcacagcgccccaccccctgtttgtgtgatccctgtaacataaatttaagttatgagtgctggcgcacataaaaacccactgaattttgcaggccgcttcacgattttcgcctcggcccctcagctgcggtcgcagagcctgctctctcatcctcccgcctcctcccccataaaaaagccgggggggggaggattcacgaaagtaatggaacacgcatagtgaacttatcttgaatgtttctgtcggtgacaggtatggtagcggtcccacggagtggcaatctactcccatgaaaaatatctgtcaacggacccgggggcagaaagcagcattctcagcgcagcgcaacgcattattgtgagctgccgcaaagaaagcagaaaagcagaagaaacgcagaaaggaaagtcatgccccttctctgggggagaaagggcttatgcgggaggaactagcgtgacaggtagcgccgggaaacgcgttttgccagtttctgtaacagccatattccctaatgtatactcatgtgcgcaacaaattacggtgtcggctggaagcgcattaattttttgtaaagattgatacatctgttctggcgtgccttcaaacagccttccacagccgccagaaaacagcgtgtcgccacaaaaaagataaggtttgctgtagaaacacagatgaccggaagtgtgacctggcgtagcgaatacggaaaactcccacccgaggatgaggatactttcgccttcttccatacagcctattaatgcgctccgttaacgtactgtcagccaccatggggatattatggtaactcactaccgcacgggactccgcgcaggccagcgtctccacctcaatctgtaaacgccgcagaatatcaatagtgataattgcttctgcttattcaaaaccaggtgccagcagcaccacaacgttagccatcataaacctcaaataatgaaacaatgtaaaacatcgtttcattttctcgcgttatcttgaagcgaaatctactgaaaaaaccacaagcttcccgttagataatataagtaggcaccagattgactatttaaaggatacacaagaacagggagcactttgtttctttttaatagaattcagaacggatcaggttatttattttgttcctgtttctgtagtagcagaatactatgaagccatgctgtatgacggaggaagaaagtctattccaagagaggaatttgagaaaagagcgtatatagtacactggataaataatttatggataaacacccttcactttcctttcaattccaactaactttataatgctttcatcaaccccaagaggaaaaactaattattttaattcataaacacgcaagataaaaaatcgttcttactaaataaagataacgaattttcactttcacttaattcttctcctttacgtaagaataatactttggagatattccagctttccatgagttggaatatattacccttttttcagtaatcctgccaggtaccgctaatatagagtgagccgtattcatcaccgttaacattcaatggctggttcaggctgacctgtatctggtttttggtacgctgataatcagcataaagctcggcattgctgtcataagatcgattgccatattcctcgtggtgaatactgtcctgcaatgaggcggcatcgttaaggctgagataatcttctgttgagaagcgataagctgccacgttaagagatatatctgccgatttcattgggtcagacgacactaacgccttatacccgtctgggactcgatcgctggtcaaactgggactggcaagacgatcctgagcgtgaaggacatgatttcaaccgtttgggtatgctgtacgcctatgattttaacaatggtttatccatgacgctggaatatgcctacgaatgggaaaaccatgacgaaggggaaagtgaccgcttccactatgccggtatcggcgtgaattatgaagctccacggcgatctgcacgacttcatgcagtggaaaggccccatcctcaccgactccggcggtttccaggtcttcagcctgggcgatatccgtaagatcactgagcagggcgtacacttccgtaacccgatcaacggcgatccaatcttcctcgatccagaaaaatccatggagattcagtacgatctcggctccgatatcgtaatgatcttcgacgaatgtacgccatacccagcggactagggtttattgaacagtatgacccgcgttggctggggttctggcgttcttctggtggcttgtcgtgagctgaatcgctcaacccggtgttttctaaaagaagttttcgtcatggtattttcaggcgttatcaattgccgcattatagcctaataacgaagacctttcatggcgtcggacaatcaggtactatcggaaggctcattacaatttattaacataagatcagtaacaaccagaagcgctcgctcccatatagcacttttggtattcagctcccgaatacaaaattactcatcaactgcatggactatgacaagctttcagttgaaacacttgctgaagtcgaaaaaatcgttgaagaaaaacgctatagcatccatgccgataaaatccatatcgacctgctgacgactcgtatctatgaccttaccgtctatgtcatggggcatgttaaaggggtgccagtccatcgccttgagaaaaaaaccagccatagcctcatttcctgtgtacggaaaacttgattctgcttcttttgcattgcacgaaaatatattacctgcatttttcaatgcataatgcacttgttactatctcctgcgtattaccttgcagcagcgcgttcttcgatccactgtttaaactcactcatcttccagcgggaggaccgtcctaattttattgggcgggggaatgctccgcgcctgataagggcgtaaaaaaatttatcactcaacccgaccgccctctgaaggggcaaaatcatttcttcagctttgcttgcaagacggcttttttcatcttctgctattgcagcgtaatcaataaccggatcagaaagtagtggcttgccatcgctgtcagaagtaatcacttttcccctgccttgcccctccagaagtgaattataaagttcttcgctgatttctacagcatcccccggccagccttcagggctgttctcataaagctctttcattgattcatatggaatgggatagttgagtctttatctgaaatatggaattctattgttgaaactactacagaaatatggaattccattgtggagtatttgactggaatatgggatggagtagttgaaacattatcggaagtttggaatagtattagcgaaaccacttccgaagtgtggacagcgattagtgagtttttcgttaatacttggaatggactagttgcctttctaactcctattttacaaggaattgctgatacaccaattcaatccattattgacatggtcagtgaagcaaattcccgaaatgaatgtgcgggggtaactggtgttttacttttcaatgggattcatttcttacagcttctggaaggtgatgaagcagctgtaatgcaaatctatgaaaagatttgcctagatacacttcactttaacattgtagaactcttatccgattatgccccctatcgacgatttggccgctcaggcatggaattaatagcccgaattctctgcatttcccgcaaacgaagctgttcctcagccacaaaaaacacgtgatttgcgagaagccgctggcctcgaatattgaggaagtggaagccgccattgcgcttgcccgggaaaaccaggtggtgctgtttgaagcgttcaaaaccgccagcctgccgaacttcctgctgttgcagcagtccctgccgaaaattggcaaagtgcgtaaagcctttatcaactactgccagtatcgtaagaaagcagacttactaagagaacaaggtaaacacaatgaagctcaggaattaatcgagcaagtcaacgaatgggttaaggaaaggggacaacgtccctactacaatccaatgtcggataaatttaagtcactaaaatatgttagatatgctgatgactttattgtaatgataatcggcagtaaagatgatgccaaagccattaaatctgatatagctcaatttctcaatgaagaattaaaacaaatcaagctctacttcatcaggatcaaaactgacacccgaaaaacacttagataatgggtggaagaaatctaaatatgaatcatttttatatatggtgtttctggattgatctcgaatgcaaaaaggcaaaggtgagtacttatagagcgcatcaaaacgcttcacaatatcatctaatgattgacttgattgggagagatctctaggatcgcgcgggtgcattgaagcctccttgaaaggtttcgagagataaagatgtaagtttttcaagcattgcatcaatgctggtcgaacttggtcttagggtctatgaagcgcaaatggaaagaaaagagtcttcctttaatcaggcgctctataataaaactatccttgaaaatgtaatgaaaactcaatttattgtcagcaagctgctggcgatggagtcgctgagtccacatctcgcaggaaatgaaaaatttgatttcagggatatggttacgtgtatacccaggtcatcggcggcgctgattaaccgccgggtccggatgtacgcgccaagcgtcatgccggtatacagcgtaaatatacgctgcaggtgccattttgaataacctgacttttcagccacgtcatcaatcttgaggtttagatgaatattgtcgttaatccactccagcaggggagtgatatgatttttataaaccattatattctcctttatagaagggttctccaggatgatgtcagattcggggagtcgaaccggactagacggatttgcaatccgctacataaccgctttgctaacgcgccttaaatctgttgtctttcgacctgcacccgcaaactgccgatgctttaatctggagcgggaaacgagactcgaactcgcgaccccgaccttggcaaggtcgtgctctaccaactgagctattcccgcttgggtgttctggtgctatgcgtatcttgcgatacttttaaattttggagcgggaaacggtcagcattactcttcaaatcacacacgcgcgggttttgcctcgggtgaacaggttttttcagaaattggctacgattattcgacgattatcaagcaacaaccggcatacgaaaatacctgtgcggtaagaatgagcctggcattgttaaaatgtaatgttgaatttacagggcgtttacccataaagaccggtccctataagggaaaaacaatcgagcctggcgcaaaattacttgccgatcagataccagaggttgtcatcaggatgacccgcagcgtttaattcagtaattaaatcccacatgctgtcgaatttttgtggtgactttctgtttggattcattagcaccctccttcttcattatgaaatattcccgtcccgtaattatacccccgctgcagtcatcccttcgtgttcgcattatcacttaatgaaacattcatgcaggcgataataatcagccatttaacctccctagtagaccaccgccgcatccgtcatatggcagcagccgcattccggcgtacgagatgattcgtttctcgatcaacatcatgcgcggctgcttcggcgggtgctccttctattcaatcaccgaacacgaaggccgtattattcagagccgttccgaagagtcgattgttaacgagatcgaagccattcgcgacacggtgccgggctttaccggtgtgatctccgatctgggtggtccaacggccaacatgtacatgctcggtggagagcctgtggcgcggcgtgaaatccctggtcgacaaaaccgattttcgccagaacgtcaaggttgagctgctggatatgtccaaagaagatctgcgtcaggacttcgaagacagcccggaaatcattcagagtggactgtataaacatacatatattgatgagtacgacactccgggtggagagccgattgctgcgctgatttcagcgtacgagtttgatgcgtctgcgcaggatgtttgttacggacaccacgcgtagagaacagtattgtggcagattgaatgattttcatctttttattctctttttctaatttgatcattgtctacaccctatccttgatatatttagcgaagttttcggcctttacatactgtataagttcatttgtaattttgtaactcctaatagaaagtcctctatttgtttcttatagaataacatacaccattcttatttctagtatataactataatagaatatgtacatatttattcaagcgttaatgtacatatttaagttagcatttataatctcttatctgttattagttctatgttggttaatatagattcttctgtgtattaagataaacgaaaaaacaacataaaataatagagtttcaaaaaaatagccctccaccagaccatttttggtcagatggagggctatttttttcatgttttgacaagttgcggtgagataagcctgcatttggacagacttctttccgtcaaatgcatcttgttgaatcgtgtccgttttggaagtaaaaaaaataaccctcctattttgacaggatttgccaacgattcctccccccaaatgggagtattttcttgatctgagacacgcttttgttaattcaatcaaaaaaacagcaacatatttcctgtttttttaacatcggtggggtatgaggtaagttagaacaggtcttgtttacatcttaatcaaaagcattttctgcaaaaagataaaaacagtccaggtttaatcagggtgttcatcacaaccgtacctttaataattagttcgcaggcgtcagggataaatcaacgtaaaccagacattcgactgaatagtgcctggtacaaggtgttcggaaattgcccggtagcgggcgctgaaatgaaataccagctcgcgggtgttaatgggtaaccagctcaccgccgtcgcgttcgggatgatctgacgttgctgttcgtcaaactctaattcggtgcttgctcaaagtgcaatgttgttagagtggcgtttcgataacgcgtggaatttggtttggggagacattacctcggatgagcgagcagttaacggaccaggtcctggttgaacgggtccagaagggagatcagaaagcttttaacctactggtggtgcgctaccagcataaggtagcgagtctggtttcccgctatgtaccgtcaggcgatgttcctgatgttgtacaagagtaatgcacaaaaaatgctatccatattggacatttcggcactatcggaaaaagtgtccacaaaatatttcaggtgatcgtattttattttgttgaccagcagcgcaaaccgtgagtctgttcagaactcgtttctgaacaggggaggggttggacaagcccaccgggcgcgtcaggttgtaacaattgggtatccccaaaagatgctagcgacttagaatctaaaaccctgctaagataccatctttaagactcgtcactcgtgactgtaaaggtatatcatcctacaaagaagccgaaaacacacaacgtaaaattgctgtatgataaaattatcattttaaaaaacctgactgaatgctttttactaaactatcaaattttaaagagggaggctaactgcctccctctattttcaagctaaagtacttgaatgcctttaagcaattcactttcgttaagtgctaattgccgtccaaaattaccaagtgaaggcgataacattattacgatagaaaaaattaataatggtcttccttatatcactaatactgatgcttttcaacgatggaatgaaaaaggtaaacataaattcggtttttatagtccggaaactgacaatgaaaatatgtctcctgaacgtttgaaaactttaatggaattagaaatgacgaagcgtgtaaatgcgtctgtttcttatgaggtaaaagcggcatccataggacgtgtatttattttcagttggttttcgaggtggacatttagccacagccccggttaaccgtaaatgggcattttcgttataccttataaacgcaacggttactcaagcaattattactccgcaatgcgtttacatctggtcatcaaaacgcaacacatttcgcttgtttttcttgttgccgtaatgataatcactatcacaagaatttacctttctttgcatcagttgaccgcgataaacatttaaggtgcatactaaattagggtaatttatctttctgctctggcaagaaaccagtgcacgttcagtcactcgcccctaaaactgccattaaatgactcaagcaacacgttgtccatcgacactaagaagtcttaacgggtcctcattcatatataatccgtccaagaaggtaacgtattttttgatagctgacctaacgagcaatagctttcttgatgtctttttttggcatttagtagacaggctcaggaccaaataccagtgactgccgggtcagatgaatttgcgccacgatagccgggtcatcaagccgcccttccggatatacaggcagtacgatatagacatgaaacggttgcgcaacatgactaaaaatcgcacgcttaattctgtcccccagccattccgctaccgggttttgcggcatttcatcgtccggcaatagccgggttgcccaagcactcagggtaggggtaatactttttgccactggtcccaccatctgtatttggataacgaatgccggttgcagagcctggagtatattgtatataaaaatataagttatcaatgccagtttcaataaaaccagtaccatcagggctaaagccagctattggagtaaaagagccagtcgtcattaccagcgactcactattggtgcaacggacaaatactgtatctcttgctatgcccatagctgatgcggcttgtgcttgagtctgggatgttttattctgtatttatttctttacggttaacgataccgaaaaaagcggagatggcttccgttagcgccagaatagtggtaagcgccagcgaatgcacctgctttatgaaggggcgatgacgacttgaataaaaagaaaccaattgtaaatcggtacgttaacccctcataccccaacctatagaatagaaatgcgtcagaagagggcgaattttcattttttgccttgttgaatcgcttcagattggtcgatgtaaataccataaagagtaagacatgttttctgccatctatatcgcagcgttgccagcgtagcaagatgtgacttacccaatcagccagagataactttaacaataacaatcgattaatacagaaaagcagaagccgatatacgtaacaggcctatcgctatgctgcattcccgaaacacatcttaacccaaatccactatatttataagtcttattgcaatattaaggagttaccctcgttaaatagattataacgatcaattaagcattactgatcgttattgacgttcatttggggccggactatcattccctcaacgacacgccgaaggtatttttaaataaggtgaatttcggttcatattagcattcttaatttctagtaagtctcgggagggcttaactcaacatcatcgcagttttacttttacgtggcaggtatctcactatttttccagtccggagtatttccgccaccaacgcttgtcgaatgcacgttacagatggaaagaacatttccgtcaagctacaagcatctcgtcaattgccactggtttgatatttacagcaaccatcggtcctgtcttacagaccaacaattgcagctcgtgaaacaacgcgtaaaggccatgtatacattgtcttttttcctctccaccgatgttcgttttagctataaaaaaagggttattgaggcattatggaaaaaataaaaccaccattaaatccttatatatcaaatacataaaattcatttattgcgttaattcttcgctttcatactctacatccgaaaccttaacctcaagctctaagcccgtcgtgtagccgttcccgttaaggtagtgcaccacccggctgattatccaagcctgctcgtctataacgcgcttaaagcctttcaccgcgattggcgtttcaggaaataaatctgcccgaccaatagccagcgagattgaaacgctaccgtcgccaaatgtgtagaggcattaaaagagcgattccaggcatcattgagggattgaacctatggcgcttacaaaagctgaaatgtcagaatatctgtttgataagcttgggcttagcaaacgggatgccaaagagctggtagagctgtttttcgaagagatccgtcgtgctctggaaaatggtgagcaggttaaactctccggctttggcaattttgatttgcgagacaaaaaataccgtaacaacaaaccaaaaagttgcattcggttcgcttcaaatagccagcaattgctggagaaatcatactggaggatatcgggtaggaatcaccgttgactatgccggaaaaagctacgattactgggcagctgaaagccatggttggggaggtaatggcgacggcatgtatgtagaccggattgataatttttgagctaaacaaatctccccccttgaacaggggggagtagaaaaagttggctcatggtggcgatcatccggcgccatgcgcgcggataaagcatcgggccgaggccttccagcaccaaaaccagggccagcgcgagccagatcgttgaattcatttttcatccttataaaagaaaaccaccgctccgtgaagagcggtggtttgaatactcaaacgagcctgagtttatcgcgttgcgttggtcggcgtcttcatataacggaagaaatcgctgtccgggctgagctctattttttattgttgttatttttattaaattaatttcctggcctctcttcgaaactgcgtgattaatgattcggcaagcggtgtctggcgagaatcacgacgctgaattaaataatatgccgctttaggcagggtttcgacaaccggcagcattatcagacggtgcgccagaagcggatcgcagcccagctcctgcggtaaaatgctgatgaaatcgctttgtgcgacgaggctaataaaaaactagttttaacaacaaaaaaataattgtggtacaaatatatgaagaagaatgcgaataatggatggtttaataagctcttttcagtctggacaaacctgcaatatatccaacgcttatgtaggaatgactgataaaagaacaacagcgattacaagatcgaattataaggaaaaaaagaatgaattgaactacccccactttcacttcgtttagaagtgagggattcctaagtaaatgttcgtccattgctttcttgattacagcaggagtacggccctggccggtccaggttttctcttcgccgttctcatcgatgtagctatatttagcaggacgtgccgcgcgttttgctttggtaccggttttagccgcagccatgctgttcagcaattcgtttggatcgataccatcggcaatcagcatttcgcgatactgttgcagtttacgtgtacgttcttcgatttcagccgcagctaggttaaatgacgcgtgctgcggtaccgctcacagcagtgtttattgctcaatactggaagcacttgaacagggtgccagtagtgaagctcagggttgttgattttttattagccagggactagactcccgccgacattaactatgctcaggagaaatgatgagccgctatcagcatactaagggacacattaaggataacgccattgaggcattgcttcacgacccacttttcagacagtcttaagataaaaatcatccatggtgagacggagcgcgacttcatcccagcactcattatccagcatcaggccaccaataacgctctgctcagcatcctgcgaaaatagtcctggtacatttctgcggttgtctgacgtcattcctcgtcccccgcatttgctaacgcatcgaaactttctttccattcagggaacagttcgcaggccaggttatacatagaggtaaatgcggaatcgctggcgttgaaatgttccgcaaactgctggacgaaggccgtgctggtgagaacgatggtgttctgctgcgtggtatcaaacgtgaagaaatcgaacgtggtcaggttctggcgaagccaggctcaatcaagccacacaccaagttcgaatctgaagtgtacattctgtccaaagacgaaggcggccgtcatactccgttcttcaaaggctaccgtccacagttctacttccgtacaactgactgtgttgaataagtttgttccccgattttatgtgtttcaatcgttccaatctctaataccttttcaattgcttctcttgtcatagtcatttttatttccccttttcttaattagatttacttttcatataatcgattactactgtttgcttctcagcagcctgattttgttctttttcttctacttcttctacttcttctacaggttgtccaacatctgttttcacatcaccctgtagatcgtataatgcgcgggcttgtcgtaattgacggcgggttcaatctgaaccagagtagctcactttgttactcaacaatgctcccaattggggagctacgtaagaacggttacactctcccatcaatcgtaatgggtttgaggagtaatcattttcgtttataaaataattggagctctggtctcatgcagaaccaaagaatccgtatccgccttaaagcgtttgatcatcgtctgatcgatttataatgcctgatttagcaatttgaacccaagctcctgaagcatatgtggtaatagatcgtttggctgaattcttctctgtttccgtaataacatatggtacgattcttccatcacgtacttcttttagaacaagattttgttgttgtaatgtagctgaatgtgtagttccatcaaaaacagtgaaatccaacatatcaacattgtttttcagttcccaatgccttttgtcatcccaataagtgcagaaagagatgaaagggcgatatcccaaacacgtctggccggacgatccggcgaataccgcgccgacacggcgcacgaaaaaatattcgtaatggggaaagtgcgggctgatgccctcaccctggctctctcccacggggagagggagaaaaccgaaccgtaggccgggtaagcgaagcgccacccggcaaaaagcgccgcgcaatcacccaaaaaaaagccctccgaatcggatcaatcgctattttttgcaaaaagtgttggacaagtgcgaatgagaatgattattattgctctgcgttcaggaagacctcctacgggaacctgaaagcacgacattgctcacattgcttccagtattttttgcccactttttagtgggcttttttttgcctcaacccaccaaaatctggcgttttttctgtggaggtgaaacgctattctctgtggcttctgaataaccaaaaagcgttggtggtgctgcgattccaggtggagtagttacgaacgcgccatgccccgatgttgaagccgggacgcaggttaacgtactggctgctgctattctcttcaccctgctggcgcgcatggctctggctggcgttgacgctgtaattaagcaggcccgcgttgatcccttcgtcaaactctttcgggtcgatgtaaccgcgaggtacctgaccgagcgccttttgcggaatgctcagcagcagaaaccattgcctttcgcagcatgtttcttggcatagttatacaggtattcccagagttttggtgtcaaaatatatttactgtcaactgcaggatccagtaactctccaaatgttggacgattttttgggtagaatttatgaatattgcgaagggtaaatccatcgtggattttaagctcacggcggaaaccaactaatacaattcgctctcggtgctgaggcaagaaatttgtcccgtctaaaaaaacaaacgattcttcctcgacagcttgttgaaagaatcgtttgtttttttatagatcttgttgaaaatttcattatatacctataaagacagcaaaaggtcatgtaatggaagttaattccagtctatgacctatttttacacgtatctcggctgaaccccttttcgatacgacaataacttgtttgccataccattttgctttgtattctaacatggatcgaaattgcgaccactggagcaaagtgatgaaaaaagtcgtcacggtttgcccttattgtgcctcaggttgcaagatccacctggtggtcaataacggcaaaatcgtccgggcggaagcggcgcagggtaaaaccaatcagggcacgctgtgcctgaaaggatattacggctgggattttattaacgatacccaaatcctcaccccgcgcctgaaaacccctatgatccgccgcgagcgcggcggcaagctgcattgattttgtcttttattttttttgaaatagtgttgttttcaacttcaaacccagcatacataaagcctttaatgttattacttattccatttaaaaaggtttcaacttcttcttcttgggcatatgcctttacgccacaaagtccccctgaagaacttttatctaggtttggcgaaaatctaagcttgctcttgaagaaacctaaaacattaaaggctaaaactgcaggcataaaaccaaacattgtcatttcattcattgcagtagattcagttaactaaaaattccatacctgatcgcaagtcatcatatgccctcgcttacccttggtaattctaactataaaaaattatcctcaggtgctctatcgaatagtttacccgccattgtggcaatacgttcgtgttgtacgagtttatctttccagtcctgcgggatagcggaataaccatacaacgcccccgctatttgtcaggacaaaaaaaatgaaaaatcttcatttctattctttccctatataaaacaacgattttgaaagaaatagttcgcctgctacagaaacaggtcataaaaaaatcttgtgtcagatgaaatatctgtggtaactctttaggtattccttcgaacaagatgcaaaaagaactgaaaatgacagcccttctacgagtgattagcctggtcgtgattagcgtggtggtgattattatccctagtaaaaagagaattaattgcaattgaatttcgtacgatcatagttaacggaactaggcataacaacgttatgtatgtggaaccaattgtgaagaacatcgaaaaagtttctatcttatatcaagaccctatcacgctagaaagtgacaccctcccacattctaatgagagaggctcccacgctaaaacggaggaggctcctacattgaaacgtgggacaaatacaaagattactactttgctacagcttcgatttcgcatttttaaccaaaaaaattttttatttataggaaatatatcactctgatcacacatatacagattttcaaaaacataaataaaacaaacaaacctcatttgattcacgcaatattatcacatacccattttattcaacctcttttacgcgccgtatctgctcaaaaggcgaatgtaatgccctccacctgactaccgctcccaacgcacgcggtggccagtgcgctcttggcattccctttacggtctgtgcgcaggttgtgccattcgatttgcgagataaacgtattgcacagcgtttccacatgacttgccggacgcgcgtgaacaccgttgggtaattcacaggtaaattccactacgagagccatacacactcctgaaatcaatcctcattcattgggcaacagcatacgagtgtgtggatgacgcgcgccatgtgacaaatctgcctacggttgtcatgttattcatcatagggacaccagactttaattatttaaggttgcgaggtctgccctcgttctatattgctgatgtgtatttattaaggagtacaaaagcgcacagtctttattcagactatttgcatcattacgcaaaattcaaaattattgttttttgggttcgtcttccgcgaacacatcaataaaggcctgctgctgtggcgtcagtttccaggaagctggcaaaaatgaactggaagccttcgaagtcgctctcgacaacgtgcgcccgactgtagaagttaagtctcgccgcgttggtggttctacttatcaggttccagttgaagttcgtccggttcgtcgtaatgctctggcaatgcgttggatcgttgaagctgctcgtaaacgcggtgataaatccatggctctgcgtctggcgaacgaactttctgatgctgcggaaaacaaaggtaccgcagatcagaatgtggaaagaaggcaaaagaagcttcaccttggtcaaagttggttataccatcaagagaagaaataatgaagcgtagaaagctaacttatatagcaaattagtttgaattcataaatctttaattaaggagagatagggaatgaatttccaaattgatgaaaagaatgtagctgctggtcaatgggttgtatgcgaattgaaggataacaaagttattacacaagtgaagtttgaatttttctcaattttttgctgctgcatggggaaatttcgcctgaatcggtgtgtttcaggcgaatatgacggggaaattacagtgtaggacctggtggaatatttggctggaaataatgaaatgcagagttaattaatgaacgttaattcattcattaaaaatcccagtcctcgtcttgcgtctccaccgctttacccatcacgtacgacgagccggacccggaaaagaaggtaagcgaacactaacagaaacgagcccacaatcataaacggcatcgctgagataaacccgtcacgaatagccataacgtgacgctgggaagagatgcgcccggcaatagggctaacataattttcaacgaagcggaaaatcagattaaatgcagcatggttggcagacatagcagatctcctgtcatacgttcgtttcggacgttctcacgtcacacgttgttccatacatcagcccactttgatctgagactgaaggtagttctgtaggccaattttgctaatgagatccagttcggtctcaagccagtcgatgtgcccttcttcatcggccaggatctggatcatcatatcgcggctgacgtagtcatgtacgctgtccgcataggcaatggcttcacgcaggtcttttgcaccctccagctccagccggagatcagaacgcagcatctcttcgacatcttctccgatgtgatgttaggatgtcgccgtgttgatggatcaatcatcaaccctgtttttgcaataacagtcccctgctggaccttctctccgttcccgaaaacaatgctttgaggatcaacttcaccatatctaatataaaaatgccgcccatcattagtagtatgctcgatagtgatttgccaagtcccaaagtaatagtgagaaatactcctaacaattccattgctcactgcaacaatttcacaaaatgcgtccagtttatctttgtgagaattctggatgaacacatttacaggtttatgagtctcccttttacgggataccgaacgcattttcctctcacttacactaagaggcgtaccctttcggtagcccgtttcgatgaggaagttactgcattatcgatctgcgacatctctgcctcctcaaggatcaaacttggatcgtttgcagagaatactacagattcctgaaatcagatccaaaacgcctacgattttaacaccttaacccttctcatgaattaaagaatttgacgtggcagcctctttagctggtacatagctgacgctatgatcggtgccctgtcccgtggaactttttgaataatgccgggtgataatacgaaggtggctgtcctgtgacacggcggaacatcgttgcgaggggtgatgcattatcgtatccaagagtcaaggctacttcatttacgggtaatttctgcattcacttctttaaccggttccgcgacgatgcgaagacgctcgtcaggaatatgtaacacttgcaaaactgccataaatttccagagtcgtgttcaggagttgataagaatattacttctattctagacaaatccccggtcgattgacagcatcagtgaccaatcgcaaagattgctgaggctgcttatggcaggtaatgagacggcgtccaccgagatatggttacaggccgtcattgtcatcgaagcccatgggtttgcaccagccatcaaactgatgacgttcagtatgcgtcccggcatgacgcgcatacatggcatgtacacgccgggtcattgccagatgcagcgcagaactcacaggactctctgcgttaaggaatatggcgaccttgtcgatcccggctttactccagtccactttttcagggcattcgaaacgcagacggatagcagagcgtccagggaggacgctctgggtctatggcggaggtgggtgctctcctgaaggaaaaccttcaaatcaggatgaagtattgcggattgctgaagccacaaaaagccggggctgggatggcgtggactttgatgatgaatgcaatatgaacaccggtctcgtcattgaggcaatgaagcagttaaaaaaatgccagaaagaaaccagttttggttttattgccggatattcttacaatcatcattccctggcaggatctctctcccgaaacgctcgataatctgattgaaagctttgtcttgcgcgaaggcaccgattatggtgaacatgaacgttcgcttgaacaaaaggtcaacgatgttaagcgccagcttaaaagcggcgacgtggtgctggtatggtccgaactgcatgagacggtcaatatcatgccccgcaacgcgtttcatggctgatctttacacttttccagtcaggggcgcccgtagctcaattggatagagcgtttgactacggatcaagaggttaggggttcgactcctctcgggcgcgcttttattaacgggaagtggctcagcttggtagagcacctggtttgggaccagggggtcgcaggttcaaatcctgtcttcccgaccacgcgggtgtagtttagtggtaaaacaagagccttccaagctctggtcgagagttcgattctcttcacccgcttttatattattccgcagtagctcagtggtagagctatcggctgttaaccgatcggtcgtaggttcgagtcctacctgcggagccattatgcttccatagctcagctggtagagcacttccatggtaaggaagaggtcaccggttcaagcccggttggaagcttgggaataggtttaaaacttttttggcccgttggtcaagtggttaagacaccgccctttcacggcggtaacacgggtctggcaacatcagtcgctttacattgaaggtttaatgggatacaaatatcttaacaccagagactaacgctaagaatttatagtgttttttcataaaccagccctgagttttcacggctggtttaagtatcgtcggcaactgcgcaaataatttctgctacccttcctcccattcaatttttctgactgcttagtagccaacgaccagacgaaagccgccacattttactttgtccatggggccgctgaccgatttctggcgccagcgtgaggaagatgagtttatgggcgtcggggaaatcccggtacgcttcgttcgtttccgtgatgaaaaaaatgaccgggtgattgtggtctgccccgggcgcatcgaaagctatatcaaatatgccgagctggcgtatgacctgttccatctgggctttgatgtgttaattatcgaccatcgcgggcaggggctttctggccggcttaatgctgataaaggcttacccatttcgggtgcagaccacgtcttgaaggtccttgcaatgttggcaactcgtggaagcattatgcatgatggttttcacctcattgaggcaaaaagcggagatctcactcatattgcgcaatttgtatctcctcctctcgatgtcgctcttgccaacccattagctgtttggccgcaaggtgctcgtcagatgactgctaagctaatatcaaataaaacgcggcgcgcggctcatataaaataagcgctcgatgaacacatcgtgtcgccacttccagccgggttaagcagtgaacttttagctttggcttgtggtccgtttcagcagaagcggccgtggaggtgataccagataatgaaccatcgttttccgctcattcagcgcagccgttctggcgcgcatttgattcccacccgcacttctggtctaaacacctggcgatgttaagaaattatcgaggcttatgatgctctgattggttgaaagcagcgagactggcgcgtagcagtaggatggggcatgcttggttctatacgtcagtagagtgatacaggagttcatatcggccagacgaagcgtgatgctactttaatccagcgagtgagcgcttaatattgtttgtcccaacggttcgaacccatttctgattaccacattcaagccactggcactcgctggtgggtaaaaggtacaaaagagactaaaatcacacacacagcaataattactcccataaccaaagcggcaggtactccaaccgctgccacaacagcacccacaatttttaatatacctgcttttagcattttggcagcagctttcgctgccgcccttcctgcttttcctgccaattttgccattttcccgcgcgcttgcatcccttttttcttaataaagtgggaagctacatcttttatgaataacggttggttcattaccgctgttgcggatcatctccagcgtattacgcgacgtgccgcaggccgggttgtgataaatggtgatattgctcatatcagtatctcattacaaagtgaaagagagacgtagcgccagcgctgccagcgttacaaacagcacaggcagagtcatgacgatcccggtgcggaaatagtatccccaggtgatggtcatattcttctgtgaaagaaagtgttttgagtatcgagagcattacctaatgccgtattaactatagcatcgcgggaaaaaatcacttcgacaatcctcaatcaatcgccgctgagcttcatcacaatggggatcgctttgccgcgccagggaagtgtgctggtctcaccgggatgtcgtcacatactcaaagcgatttccattgtctagaaactaaaaagccagcggcaggcttgcaatgtgaggctaaggcaaaaatcctgcgtgttccgcgttctttcttcatattcgtgggagacctgtgcaaggatgttctcaggtgacgtcagccacttattcctcagcagtacgctgaccgcgggatgatgggtggccagttcaggaatgagttcacgtagcgtgtctgtgctcaactgattcagccttgtatagtgctcatgggtgaaagcatgttcgtcatacagaagctgccatgtgactggtgtacccaattaagccgtatcgtgcgcaatttttcagaatcgcaaggttctaagtacaaaacaagcatataaggaaaagatagaatggctaaggggcaatctttacaagatccgttcctgaacgcattgcgtcgggagcgtgttccagtttctatttatttggtgaatggtattaagctgcaaggtcagattgagtctttcgatcagttcgtgatcctgttgaaaaacacggtcagccagatctcttatatgagcttttaatgagcttatttctgtacttaattgtttgttttccttctgtaaccctacatttctcttttgagattctttaagtgagtcacatatctcatcgactgcactatgtaattctttgttttcttttacaagatccgttttttgcaaacgttcataatcgctctttataataaccgctgcatcaaccttttttttcatatctctccattgctcacgtgtaacagaaacgttaaaacgttcaacggcagcatcatcatatatacgcgttgtgacgccggtcgttaactggttagcagacgcaatacggtcaaggccgccgtaggtacggtcgcggaacaggccgctatagtcagattgcagtaaagacgagtcgtagttttgaatcttgctctgatcgcgataaggcacgtacagatactgcatacgtggcgcaagcgtctgggtatatccatctcacagtaatgtgaaaaggcgttgggcgcttaccctacgacgatgtagaacgtgttcaccgtatgcataaactattaaaggtacaggtcgaaaagttatatgattttgttcaaaccggagctgcttcacgtgaccaaaaaaacgaatataagattataaaaggaattgacgagtggtttggtgcgacacgtttctctataaatagttaataactatgaaatgagaagactatctaaagaaatcgggctttctaattcctccacattctgtgtttgtattgatgaagctgaatttttaacaaaagatcatcatagaatattgaatactcatatgaggtcatataatgagatcgtgttcaaaataacaacaatgccataccggcactacaccctggaaactgatacgggtactccattaaatatggggcacgactttgattatttaaatattgataagcaaggcctgcattcacagtaatgtgaaaaggcgttgggcgcttaccctacgacgatgtagaacgtgtacaccgtatgcacaaactattaaaagtacaggtagaaaaattatatgattttgttcaaagtggtgttgcttcacgtgatcaaaaaaacgaatataagattataaaaggtatcgatgaatggttcggtgcgacacgtttctctataaatagttaataactatgaaatgagaagactatctgcatttcattttttaacttatctatttttcctgttccctctgaattaaggacactctgtgtttttgccacatcagtatcaagatttttcaacttcttatctacctgtagttttagatctgttaactcattaatttgacgttgcacactttcttggtttgtgatggtcatgtcttgaaggacttccagtctatctgtaaacccttctttatcttccttattatctacaaatccttactacactctttttattaaaattaacgaaagttgcattttcgtcgttaataataaataaagtttaatttagattcaggccattcattaataacccttaacattaatttcacatgagtaacttttagcctggctttgctaatatggcaatcggtatctcagcattcaggttttacgaatgatcactcagggggactaatgcatcagcccgaatcgtctttttatttacaccagaaaaaaagacagaaagtcttatacaacgaatgtagtaaacggaaatattatgttgcttcatagtcatatcaaattgccaaaactgaaaatggtacatatcaaacaacatagagagataccacaagactatagggtcaagtcatgtacgatttctatgacacccactgggaaatattatgtatccatcttgactgaatatgaaaaagaaattgtacaaaaagaagtagaaacagttgcattttgcatgaaaagaatcattgatttttgtaaatctgctactgttaatttagtcgttaagtcatataatttctgattttgtttctctaaatcatttaaatatgcacgttgctctgctgttagtttattaatttcagcaaaagtattatatgtttttttaattttttcaggatcaattactttcataagatcatactctttcgtttttgtaactgcagctgcagcgatttcacgtgctgtaagaggtcgcagcagccagccaggatgcgcctgcacccagttcgttgataccttcctgaaggatctggcctttctcgtcttctttgtagtatgcaacctgctcacggtcctgcggggtgtactgctggccgttcggactgtagataccgatctgacggaacagaccttccataccgaaagtacgcgcttcgtcggcgatgattggaaccagacgatctttgatcgagacgcgaaccgcgccatcgccagctccgtacgcccctgccgccacaccgggaacagctggcgcggttgcaggaagtattgcggctccgtcagagcatgcacaacctgcaacgcggtcgagagtgccaggaacataaaccacagcggcgcagacagataggacataacgcccgtcaggaacaccgcacggtgaacagggtgcatccctttcaccaggaacaggcggaaattcatggatgtcaccgcatcgtggcgcaggatccaggccagtgccatttgcgacagcttttgcccccgtttttccgccagcgcattcagcttacgtaccttttccagctttttgtcggtgatctgttccggattaaggaacttactgccgcttgctgcgcgagaatccgctgggatgccgttcagatagcgatcggtcaactgtccgcccgccagtggagagaaggggatacatcccaaaattcggtcggtcccatatcgaggggattttcaccggtcatgacccggtgcgaggtaggatccaggctcagaccctgcatctcaatcacctcttccaccgccatcggtgaaatacggcgcatcacggctttgatacgcgccaccagctctttcggggagaacggtttggtgatgtaatcgtccgcgccggtttccagaccgcgcacgcgatcctcttcctcgccgcgcgccgaaatcctctgctttttacgatctttttcgtcataacaactacagcgataatcttcctcagtttacgaacataacgattgaggaatcatatgactatccctgcactgggtctgggcacttttcgcctgaaagacgatgttgttattgcatctgttaaaaccgcactcgagttgggctatcgtgctattgatacggcgcagatttatgataacgaagctgccgtaggccaggccaaacatccccggactcctggttttggtccatgttgaaccttaccattttaaacttggcgctatccgggtccatcaacccattcgcaatttcttgctgcccaagttgtagtgctttttcctcggaaggtttacacgcaacaagtgcgatgcaggctaagcttaaacaaagaatttttttcacaatcatcccctgagtatcatattttttttctaataataaccaggggatatgagatgttcaaccaacctttgcaggaacaaaagaactgatcaaagtgcagccgcaaccgcacctgtggccgtgaaaagcaacagggataccattatccaaatagttgcgattaccttcgataatcgttgtcggaccatgtccaggtatcgggcaggaaaccctgtcacctttacgtgccacgccaattccaccaaaaatcatggtttcggaacaggtcattacggaaccaccgtggagtttgctgtccttgaactagtgtctcccgttggaccagtagctcctgttagtccagttggtcccgttactccggttggtcctgtatctccggttagtcccgtatctccgattggtcccgttactccggttggtcctgttactccggttggtcctgttactccgatcggtcctgttagtccggttggtcctgttactccggttagtcccgttactcctgttggtcccgtatctgttctccatcgaaggcctgatgggtggaaataccgatccagtcatcaataccacctcaaatgaagtcgaaaaaacggaaaacacagcggagaccaccagcgatgtgcagatggaaacggctaagccagagaaagacgaagatgttggttcggtaccaccgggcgaaggcactgatgcagctaattcgcagacagattccgtagaagcagaccagttgcaggaaacaacaatttaagctaatatcaaccttaccacaagtggaagctgccgctataatagccgcggaaggatatatacacatttataaaaatggttttgaagattcaattggtgagctccaatgaataatcttagtctaactactgccgagtttgaacgcctactaaaagtatttggctggctgctggggctactaggcttgctgatttttcttttccaatggtattacctccatcaaccaatactatgccgactggctgtatgtgtgaaatgggcctcaactcgccgggagcgcctgttctcagaggttaaacaggtttaacaaaaccacccgaaggcgccactcgcaggtttatgtggcattggcatgtgattacccgaaggcgcctgtctcaaatcactcaggcattggcagttgtcatgatgacaacggttagcaggtaaatcctacttcaggtttgcacattcttcaacaggaatgttaacagtgagtgggctgtgacaaccagcatcccgcctgcccgccatccctgaaatccgccatttcgtgcgtcatctctccgtttcaaacgtctcctggcaaattgccgttcccaacaacagaacagcactatctgctgttttcttcacctctcatcgcattcttttacaggtaaatcacttgtttttacaccattatcatcctgttaacggaagcgccagaaccttctgccttcttcatcgcgtatccctcctttagtatcggctatattctctctcgatgttgtgagcatattatcaacttggtcttttacattattctgaattccgctgtcctgtgtacgttgttcgatagtagcctgatgagactggtgatcggcaataacatcgctatttccaccgccaccagaaatggcccccataccatggccaacatttcctttagctgctgaatatgatcctgcgagaagtgaaagcacgacagtgatcacaaatgaaatgttagcggtacgtttaccggcctcgaacgtctcttccaggtagccaaagtccatcagcatatggcgaacgccaccaaccacgtgataggccagcgcggtcagaatgccccacatgataaatttcacgaagaagctgttcatgatggctgaggcctggaggaatccttcaggggatgagaggctagttcccggtttctgaatgcagttccataggtccacctcatctgataagccaccagggcataacaccatgttagtgataacgattatcacttcaaccccctgcgagcaggggctttgggctaaaccgccctttttggctactttcattaagcatagaccctgtgacgggatgcggatgggatggttagatttgttcaatgcattgataaataatgcatttcataagaaaggcggtaagctacgctcagcgtgagaaagagaacaatgaagatgacgcgacacgtctggcgcgtatcaacgatcgcttcaaacgtgaaggcaagcctctgctcaaaaaactggacgatctgcctaaggattaccaggagcccgatccgtatctggacgagacggtgcatatcgcgcttgatctcgcgaagctggaaaaagagaaacctgctgtgcaacctgctccgacaaaataatccccgttagccaatattcgcaaagcggcgttatctatgcgcgcaggtggtgtaggatactacccacgtagcaactttgtgcatattgataccgggccggttcggcactggtaataacgaaacacaggagcagtatgaactatcgtattattccggttaccgcgttctcacagaactgttcattgatctggtgtgaacaaactaaactggccgcgcttgttgatcccggtggcgacaataatatatttctctttcctaatcgaaaaaaccctcctaaagtagggtgggtagataataattcacctgtactctaagatatgcgaaggtaaaaggaggctcctttgggacagaattatgcgttagtcgttgatgaccatccattggtagcaagcggcatcgccaattttctgattacacattgccagtttaaacaggcgtgtgtggtgacgaatgaggatgattgctacaggtagccgtatcggaaggtgcggctggatcacctcctttctatggagaattgatgaacgctgttcatcaataaagtttccgtgtttcgttttgttcagttttgagagaactatctctcatatataaatgtatgttctttgaaaactagataacagtgtagctcatattttttaatttttagtttggttaagttagaaagggcgcacggtggatgccttgacactaggagtcgcttccccctcaagctggaagaagtttctggcaatcaccgttgccagaaaaccgtagaccgcaaattcataccactggatgaaattaccgatggagcctgcaattaatgcacgcttgtgcgcatcctgttgcataacgatcctcacaaaaacggggtaagaataaattattcagtattagtgaagtaatgaaatagtttattcttatgttctgtgagctatttcacgaatcagccgccacccggcaaatttaccgaacccacaaaagcaaaaagcctgctttaaaagcaggcttttcaaatttggctcctctgactggactcgaaccagtgacatacggattaacagtccgccgttctaccgactgaactacagaggaatcgtgtgaacggggcgcatattatcgacctccgtacgccttgtcaaaggatggatcgcccactttagactgtttgctgacaaggcgcttataatgctggctttcgtgaaacggagacacaggaaaggaaacgccagaagtacgcgcaagaaattcaggcaattaatattggcatcaagaaaaatgcgccaccagagtgacgcatttactatcaatcaatcgcgcgaaatattaactccctctctggatgttgaataaggctgacgtaatccttcagggcatcctggcgagtgacaagatgtttgcagactctctatgggtagtagtaccagttccataggcatgttacgtttcttaacttgcccggctatccagtacatatacggctctgcccgtaatgttacatcgtggagatagctcttatttctcaaatagttctgtttctgttcgcgaatccggctgttttccggaattcccatctttagctcgtcgccaatagaggcccacaagtcttgttcctgcgcgaaggatgtcccatcgtccgatggaaacgcccaaggatcagtaccgtcgttaacgcaccaagcagcgcgcaaaacatatcagactgggtatcccatggatcgccctgcgtccccagaaaatcatccgcaccctgtcccatcgccaaagcagcccaccactcaatgagttcataggtggcgctaatggccagagcaacacagcacaccagaaatcccgtcatcttatgtccacgaacatacccaccgcgccgcagcgcgtcagatcgtagtaaatactaccgtctgattgaagcctccctgtacggcggtatctccagcgccattacccgctccctgcgcgactacctgttgccggaaaacagcggcgtgcgtaaggccttccaggatatggaagccgcgctgcgtgaaaaccgcatgacgctggaagcgattcgcgttacgcagtctgaccgggacctgtttaaacacctgatcagcgatcgcacatatcgatcatggtgcgaatcagcgcgctggccacgccgcggttatgccactctgcgccaacgcatataccgaaatcggcaacgtggctgcggcgtggtcgctgggcgacatcaatggtgaggtggccgaccacgatatcatcaatgcaggcaaccagctgtttaatgcccggctgttcgcctagccgcatttgccacatttccattgaaggatgaggaacctggggggctgtgagttttgttttcttctacaggttagctggtggtctgactgccccggtctggttaacgctaggtaagtatccggatatgtcgctaaaacaagccagggagaagcgggatgagtgccgggcgtggcttgcagagaaacgagatccacgcatacagataaagattcagtccgaggagcgtcttaggccggttactgttcaggacgctctctgttactggtacgatggtggaggagctggacgttatggcggctgccaaagcgcagcaggcgtggcgaaaaattattgcccgtatgcgttataaggttgatgggctgcgtaacggtattgacgtcacgaccacgccggaagggtttaaattcgtctaccagcagttcgtgaaggcggtgcgtgaaaaaccagagctctcggccctgtacggtctgatacaggccagcaccttcgataacgcgaagaaatttcataatacctatagtggagcgcctcaaggtggaatcattagtccaatactttctaatatttatctaaatgaattagatgtttatatgaaaaagtatcaggatagatttgaatcagggaaaaagcgacaaattaataaagagtatagtaatttacagtataaagtacgaaagattcaagagaaaatcgatactgcctatctaaatggagaagtaacacgaattagaaatttcataatacctatagtggagcgcctcaaggtggaatcattagtccaataatttcttatatttatctaaatgaattagatacttatatgaaaaagtatcaggatagatttgaatcagggaaaaagcgacaaataaataaagagtatagtaatttacagtataaagtgcggaagattcaagagaaaatcgatactgcctatctaaatggagaagtaacacgaattatgctgcaagcgtgctgcctgaggatcgggcgattcaggattattacctgaaagtgaaggagttacgtgcaaaaaaccaaaaaacactccccgtaattctgaaaaatgaacgacaaattaatttatttttaagaactgatgatgttgatttaattaatgaaattaatcaagaaacaaatttgttacaacctgaagcgcgatttgcatggttaaggtcaaagaaagataactagtgtgcattaacgtttcttcatgcaataaattattatttcgaaaaaatgaaagaagttgacactggtgaacaaccattttatttaaatgaaatgcctaaagacaacctcgatgaattaacggatttcatctcagatgcattcaaaaacacacccgcgaatttatcaattactttcaaactgcacaatatgcttttacccgcatgttccaatcatgatggaataataatgactacctgttaaaaacccgtgtgcctgatatgtccgcctaccgtaagctgctgggggaaaccctgctgcgtctgccaggcgtgaacgacacccgtacttatgtggtgatggaagaggtcaaacagagcaatcgtctggttattaagacgcgctaacacggaacaggtgcaaaatcagtgtagtttgattacactcctgttaatccatacagcaacagtgccggggagtcgatcgaccgagccattgatgaagccaatatccgcctgcaacggcaatactacagttaaggatcgcactggcgcacttatttttttattcgttttaaacttccctgagtatattcccggcgcttaaggctaccgggaatgatgttatttttttaccggcaacgtgcgctgccggaaaatgttttactcaaagcgataagagaccgacaggcccacgccatagttacggccgatccagtaattgatccttaaggagatcatcttgagatcaaaaagagatccccggatcgttcaatgccccgttgcgcctgggcctggatgctgtcttcattaactgcggtgtgtggtatgttgactgttgtgtgcgggatcacctattgcggtatgcgattgtattaactggggtatgtatttccgttgactgtgatatgcatatatactttcctttgtggataactgaggtgcgtaaggcattatagaccttacgcctcttcatacaagcctttaccccactaagtggcgattaaataatcacttagcacttcggcttactgccctgcgccggaagataacgctgcggatcgatggctgtggccttatagcggatctggaagtgcagcttcaccgtatccgtcccggtactgcccatggtcgcaatcttctgccccgccttcacgttctgcccgttatcaagaggttgaaattttaaaaatcggcttagaatctacatctgtttatagttttcacccatccatgtttctccaccatgacgaagacttaaaaagatttggcacaaaggtatttcttctaaatccaaaacaagtcgcaaacttcaagaaaagttattcagacatgaataagactgacgaaattgatgcctttgtcatcgctgattacttacgatttgggcgaaatcaattcactgttcgtaaaatttccaacggcgaaggcgttgagcgtgtcttccagactcactctccggtagttgacagcattgctgttaaacgtcgtggtgctgtacgtaaagctaaactgtactacctgcgtgagcgtactggtaagtctgctcgtattaaagagcgtctgaactaagattcgcttaagcgacatcctgttagaaagggctggccgaaaggctggcccttcttaatatcaaacttcgttaatgtgctggtagagcctgcgccggtaaataccgttttagatacttttcccaactgaacatctaatggattacttaatccattcacgacctggcaagcagaatcgataatttctccggtgaaattaatctgcccttcaccgttggttgccgcaaatgcagatgcagaacatcccaccgttgcggcgataaacaaccctaatgcaaccttgacaaagagagatccgcagccagtgccggcagcgcagcgaaaaccagtaaaagacctgcttttttcatgttgtgaacctttatgagaaatcggtgctggagaggaaggtctgaccacgacgtttgcaacagctgtacggttgccacaacgcccaggcatagttaccgtctagggcaatattgcctccggcatcaggaaatacggcgcagttctgtgagagttgcggagcctggatggtcacgctgcgcggcgcctcaagcgggtgcatctcaagacctctcacgtcataccagtagaagcgataatgcaccgtcactggctcttgcctttcgttatagagcgtagaagaggctgaagactggatttcgcttatggtcagcgaaggcttctccgccgtgatgcccgcagcaagcactgaggactccatcaccagcgtctgttcttcactgaccgggacacggcgcagatagttttattcccattttcacaagtgacgctccccatgaatgtattcaaaggccggcattttcagcgcgacatcgtcctgtaggcggtacgctggtactgcaaatatggcatcagctatcgtgaactccaggaaatgctggccgagcgcggcgtaaatgttgatcacaccaccctttaccactgggttcagcgatatgcgccggaaatgaagaagcggctccctacaagttagcctggctaaactcagaattttgcaagggaaaagttttacgcaatcgcagtcacactttctttatcaggaatacagaggaactgatgcagtcaaaaattaactggattgataacctgcggggaatagcctgtctgatggtggtgatgatccacacaacgacctggtatgtcacgaacgcgcacagtatcagccctgttaactgggatgtcgccgttctaacaccattcttgctgtttcttggattatcctatctatcatggctgggattcctagagggcgctttttaccattgcccttgtcaatgtaatgccttcgaacgggtttaggtttgtagttgtctatgtgtccccagatgagtttgataagctgttccgtttccatttgtaggtagtagttcacgtctttcttgtcaattccgaccgttttactcccacgattgcgttctaacaccattcttgctgtttcttggattatcctatctatcatggctgggatccctaaaggacgctttttaccattgcccttgtcaatataataccttcgaacgggtttaggtttgtagttgtctatgtgttcccaaatgagtttgataagctgttccgtttccatttgcaggtagtagttcacgtctttcttgtcaattccgaccgttttactcccacgattgcatgttccagagtcttcgaaaaaatcagtggaagaagcgattaggggcgttagtacgtatggtattgatgctgaagaggcattagaaggagttcgccgacagtgggcattaaataaagatgcttctgacgaaacaaatgccgctatagttaaaggagcagcgactattgcagcctcctacgctggaattgattttaatgaacttatacaagaaaccaatgagattggtggtcgttcggctgccatgtaccgtcgatcacctgcaacatgcttggttttggcggctgcggataggcgaagaagaagatcgcactcgccaggttcagccaggtgtccgccaccagctcaggtttgtcgagcagtgtacgcacgtcgccgtacatcgcttcagagaatggaccgtagttgtagttgtaagacaactgtttcgcaccgcgtccgaaatagctcaggaaattttcacttagcaccttttgtatttccgcaatttccctttgtgaaatctcaagtaatttgaagccagtccaactttctgaaaagtaatttaaactatcgatacgaactggatcttctttatgctggtcaaaagctaaaacaataacattgtttatattgtttttatgcaatcgcgtagccacgtcaatacagcgttcttcgtagccacaagaaaataatgcaatatcaggcgaagcggtcagcgagatccgcgacgtgcgcaacaccgcgatcatggtgaaagaggcgctgccgggctggagcggggtggattcccgcattatcgatatgccgggcaaaatcgatcctatcccgcatccgtacggtgacgatttgccgtgcgcggataacaaaccggttgagccgaaaaaagcggaagcaaaggccgtggtggtgcagccgccgcgtccgaagccaggtgatccatctcatgctgaatgcaaatcgccagcagatcgtcggcttccagctcaaacggattgccgtcacgatccagtgcgcgaattttaactttttcggcacgtggcaccaaagcgcgctgttcagggatagacagacagccttcctcaatgcctgtttcgccgcttttttcaagcagttcagggttgatcagcaccagacgctcatcgcgattttcagaaacatgaaaaagagattgttcccgacaaaaaaggggcagtgcaagaccgatcattggtgcggatactaaaaggcactcagctggcgaaaaactatatggctagcatcaggagtgccgatgtcgccaagctgagagatgaatggtcgaaaatctatgctcctgcaaccgttttaaggcgtttggccttactttctcatgtattcaatgtttcgcggaaagaatggggcatgcgtaggtttaaattctttgctgtcctgccacttcacgccctgacgcaggtggaaggtataggttttaccgtcttcgctgatatcccacttttcagccaggacaggaatcacttccgtggtgccggttttaaattcaaccagacggttatagatcggtacagaacttgcgtcgtaagtcgtaccagaggtaaagagctgtgggttaaagccttccggagagccttcagtaacgaactggctcgttatggaataaaaccggagcaccttatttccgatccatgtatgaatatctacaccggggcttactatcttgcaattgcattcaaaaagtggggagtcagctggcaggccgtgggcgcttataatgcaggtttcaggaaaacagaagaacaggcgcagagaagatatgtctatgccagaaaaattgaggcaacatatcgggcgataaagaatgtctcgccgtgttaaccggtgatgcaaaggtgacggtaacgctcgaatgtcagcgttgcgggaaaccgtttgtacagcatgttcacacaacgtattgttttagtccggttcgttctgacgaacaggctgaagcactcccggaagcgtatgagccgattgaggttaacgaattcggtgaaatcgatcttctggcgctggttgaagatgaagtcatcctctccctgcctggttgcagactggactgacgagcagatctgggcgctgaaccgcggtggtcacgatccgaagaaagtttacgctgcactgaaaaaagcgcgtgaaaccaaaggtaaagcgactgtgatcctggcccacaccatcaaaggttacggcatgggtgataccgcagaaggtaagaacatcgctcaccaggttaagaaaatgaacatggacggcgtgcgttatatccgcgagattaaaaaagctgctaattaattttttatttttcccgtcaaagagttatttcacacacaatacgccgtaacgatcgttgcggcctttaagggtattttcctatgagtaaagtcatcgcttcacttgaaaaggtactccttccttttgctgttaaaataggaaagcagcctcatgttaatgccattaagaacggctttattaaattaatgccgttgacattagccggcgttgtcagggtatttcccgacaaccgggtatttaaggaaatagcgtaacctgacgtccatgctggtgatgctgttatctgagaggcagcaaatgagctgatggctgtgccatacgggcagataaatacccagttgctcatagcagagtttcatccgcacgagggtattctgcgttatcggtgctttcgttaatgcatcaatatccgcgagaagggctgctttttataacgcaaaattcacccagggtgtgtcggtgtttggcgctgaagatacaacgctgaactctgaaagtgcgttgaacgtggccatcaacgaacactttggactcaaggtggcgtacaacgtaacctggaactcatccccacctgattctgcgccggaacataccgatcgccgaaccacgatttctttaggttataaaatgtaatttcgtcgggccgggaataatccagacgaaacagcgatgaaaactagcccgcagatcgctgcgggctaacgggattagaactggtaaaccagacccagagccacgatgtcgtcgttgttgatgcccagcttgttgtcgtctttcagctggttgatctgatagtcaacataggtagacatgtttttgttgaagtagtatgtcgcaccaacgtcgatgtagttgatgtagtcttcatcaccgataccttctgatcagacgggctttatcacgctgtttcggcggcagtttatctgcgaggatggcgataaacaccaggttatcaatgccgagcactaattcgatgacgaccagcgtcaccagcccggcccagattgatggatcggcaatccattccatagtaaatgcaataccttctgttatatgactaatgtcacacttcgatcatggataaagccgacggaaattgcaatgccggctaatacgctggttccgtcgctgaaaataatctcctcatcaggataagccagaatttccgggtgctcttttacgcgcagccaaatatctttctctttattcaggcagagatcatcccccgtaaaggttaatatttgtggatgaatatccggggataaaccgacgtcgacggtgtcgatatgggtaataaaaccaatccgcggcgcgccgggaacattaccttttttgcaacacatcaagttcattctggtagtgtcttgaagtttcttttgcctgtggtgaaatccccaataacccggcagaagcaccagcggaggctaaaatatcgccacgttgtttttcatacttcatgcattcaaagcggtattgatagtattgtcgcccaagccactcaatatagctgtccagatgacagttctgtgctccgatgctgacagtgttaaaaggcaccatagataatcaaaaagcccagtatgaagcttaaaataaccagcaacagagaaagtgccgagtaaatataatacagaacctgtattttaaggttggtttcattgattgtattaacatcttttgttaaagccgtggatgaaagctggcttagcggggcatccagtgaatgcatatttttcagatagagctttaactctgaacggctcattttctcaagatgaccatctagtaaaacaccacatcgctaggatgtgtttttttgtcatgagcctctaggtcgcaatcccagttcatatcttgactagtagctcgttgccatttgaaaattttaaaaatatcttgggttatcttatttgcaacatgctgtattgaagaggtctctccgcccattttcaacattcctgtttagtgtgtgtaggtaaaactctgaatcaaaaatcattcaacaataagacgtcttgcagtcttaaggggactggagcatgcaactgaattccaccgaaatcagcgaactgatcaagcagcgcattgctcagttcaatgttgtgagtgaagctcacaacgaaggtactattgtttctgtaagtgacggtgttatccgcatccacggcctggccgattgtatgcagggtgagatgatttccctgccgggtaaccgttacgctatcgcactgaaccttacatcattaacaagtaaacaatttaaaacagatgcttttatagacaacacgttgtaacccaaaaagtctaacagaaacaacgcaatttttttaatccattgaattaaaagataattaactcatttatgtaaatttattgttattcatatcacaaattattcacttctgattgcgaaacgaacagcaaaagcataaaaccagataattaacatattaatgaatggcttcttttaatccattccagacagaagatgcggttgacttgataccttcccagatgtttgaaagtgtagatttaataccattccaaatgctactacttgtgctactaatcatgttccaaaccgttgaaatcgcttctttgatgctattgaatacagaactcgctgtggaaacaattgcgttccataagctagatagatagcttttaatcgtattccatactggtcttgccaccctccatccgctgcggctcatcgaggatcaagatgggccggtttgcgctgatcacatcgatcgggcgacgtgactgaaaatcatcaagcgcttcatagatgcggcggttatctttgccagtggcgttaaacgcttgtacgttgatcaccatgacattgataccggcagctgaggagaagctctccagatggtgcaactgcttagagttgtaaatgtcgcgtaggggatctggcacggatgtccgaactacagtacggcaagatccctgagctggaaaaacaacttgagatcgcacgcaatcggaaggcaaaaccatgcgtctgttgcgtaataaagtgacggatgccgagattgccgaagtgctggcgcgctggacgggtattcctgtggctcgcatgatggaaagcgaacgcgagaaactgctgcgtatggagcaggattgagattcttttcgtatggtttcaattgttttttcattctctttcaccagtttgtttagctgatccagcatctcttgtttattacctaacgaactaagaatttgattataaatctttcggaattcttcgttaggatctacaatttctcgataatctccaaatacatatttatcttgtgtaggatcagtaaaagattcgtctccagctattgctcttgcttctaaacgatccagttgtacgccagcacgtactgtacacagaagctaaaatcaaataattttagtctccttgtattgaaaaaccccgcaactgcggggttttttgcattctgcatctcaacggaggaaccatgcctgaattacctgaggtagagaccagccgccgcggcattgagccccatctgattggcgcgactattcttcatgctgtcgttcgcaacgggcgtctgctcatagtgacgaactgaataaactggttccgcagctcatcattggcgatcctgatcgtacctggattcaggataatccgcagtagtaaaagacttcacattctttcctttcattcagggggaatgtaagactgtcaaatgacacgggtcgtttgatatgaggcagaggtaaaatatggacggttttattcagccccatgctttcctgtttgccatataagggctctcggtctaatgtccacttcatatcgaccatcatcgagctttttaacagacataaagcctcccgatgatgttacagcgtacttcaatttcctgatttaaatagcaaaaactcactgtgcatttgctgcacaaaaaatcgccgtaaatggttagccagttttctggtctgagtggggtgacgttgttgtctgctgcccaaagtgcgcgagagccggtggaatctgagcgtatttaattatttcggagccagatgggaatgcggtctcccagggctctggaattttgtatttcttccgggttgtttttggctgaagaactaatccccctaaaatttcttttgcaggaccaaacctcagcgctccagggataatttcgccaagaatggattcgacaatgtcctcttcgtcaggatttttgcaaacccacacatcaacgttcttactgtcataacgtcaacatgcagcgagcaacgcttgagctgcacaacaagccacagcaccttttcttgcgcaatatcaaggtgatgcaggagtcagcaacggggcctgcgcttaagatgaacttcgacttgcgcaaagacgtgcgcgggaagtttatggccaaaaacgagacgctgttgtcgcttgcgaacataaaagcggttaatgaaaaggggcagagttcggtagatatatcaatataatccgatgcggtgatatccacaatgtcgcgcgaagtggtaaagcattcagggcaggcacggctgacggcaatttttaacgttttcatctttatctctttatttcaggcaatatggggccctcgacttcttgcggtaaagaaatcgattatttccggaaaaaaaaagcaaagcgtgtccgctgatacgaaatcagttaattgcttttttgctgagtgcgcacaggcagaggaaggaacattacgccggatgaccttaggcgagattgcaatggctcgcagagtgttcggtgattcgatagtgtatagccgtgtctggattcattgcgacagctatttaccgttcggcctccagaaacagaactacgcgatgactcccaacggggagttgtggtacagaaaacagatgtacagggaagacttttccgcaaactcagttttctagatctccgccagctcgtagggctgaggctggctggcctgacaggtgccaaagccccacagcgcaaagcccgctgcaccatactcttcgtagcccagccgcccctcctgcacgtactttggctggccattttccaggtaggctccgtacatcattccacaggggttgatgacgttggtgaagttccatcccagcagcacgttatcaatgctgttgccgtatttgagtgcggtccaccagcgcgccaatgcacgggtcgacaaacgcatcgaccacgcgcaccactaaaaacatggtgcccataatggcggcaggcaaaccgaatacgtccgtatagaaataagcgagaaataacgttgccgtttgccagaccagcgcgctggccatatcgccgaggccataacctattttatctttggtacgtaatacagaggagattgtcattgggtacgcaggcgctttacggctacgaagcaacagtcgcagccaaaccagtggctgaatgatgtagagcagggcggtatacaacaattccaagcgattatccgtttttttagtttcggccgggaaattctaagcatttaagcgtgctaaagctatctcttatgccagataccgttttaaacggaagtagcgtcggcccaggcgccagcgcaaacgcgggcttttccatctgaaaccgctgcgcggtaccggcctggtggtgttctcgccaagcctggtgttcatcgcagtggacaacctgttcggtggcgatggtcgtttcccgaccaaagtggaaggccgcgagtttacccataccgaacagcgcgtgattaaccgcatgctgaagctggcgctggaatcctacagcgacgcgtggaaagcgattaacccgctggaagtggagtacgcaactgcaacacattctgcccaaccttccatcgttgatgctctatcagaccactgaagaaaagtatttcacgcttcagatgatgaatagtgctacgaaccagcttgagccatacaagatctgcgttgcattcttcaaagagaaccgtttgatgcgtatacacgttctttcggcattttttgctcgtactggacctggtgcaccgggcgagcccatcccgcaaaggaacttcagacaacctcgcgccggaataacgcaggcagcgcgtcagcgcagccagcttattctgcgccgcaggcgcgcggcctttgatgccaccaaaggcaggacactcccctgcccttctggatagctatgcagcgtcatttatacagcgcaaaaattcgcgcatggcactgatacggcgctgatcgtccagccgcttaccaaagttgttgatgtagtaccccagatacttttgctggttttaaaaacaaataaatcacgcttattataacgccgataattatcactaaaaaaatatatttaaacttcatttatcacccttcaacaaccattgaaaactcagcctcgttaatgaatggcatatatccaaattccgtataacgctgaagaatgaaccatgaacaaaaccatggaaagtcttcaaaccatttcccattaacatcaaatgatggttcggattctactcccccccagtaaaatatactaccccccagtagaatgagggtgatacaatttagggagttattttggtgaatgaggtttcagaatgtcgcatacgatccgtgataaacaaaaaatcatagcccgcacaaacaagattcaggggcaggtcgtggctctgaaaaaaatgctggatgaaccccatgaatgcgcctccgtactgcaatactccaccacggcgttgaagatacgtgcgccgtcaacgtggaggccgagcttgcgctcgcgggtaaaatcccatgccgctttcaggtattcacgcggcaggactttaccgttatgggtgttttcgaggctcagcagtttagtgcgggcgaagtgaatatcgtcagctttgattttcgccgcgactttgtccagcggcagcgtaccgtccggcgcagcatcgcgctaatgtccttctgcaaggctgttacgaagtccttgtaactttcgctggccacaactgtcagtacattaatgtcatgaacaatggacgggtgatccatgcgatcaccattctgattgacggacaaacgcaggccacgcccgacctcctggcgacgtgaaatggtgttatcactatgcttgagcgtgcagataacaaacacgttcgggttatcccaaccctgacttccttcagggcgactttcgtgatgaattagtgcttaaagcattacttgatcgtgtaggtgacagtaaggtccaggttgtcatgtcggatatggcgccaaatatgtgtggaacaccggcggtggatatcccccgcgccatgtatctggtggaactagcgttagaaatgtgtcgtgatgtactagcgcctggtggtagttttgttgtgaaggtgtttcagggccaacggcacctgcttcgcctccttcggcgcgcaccctgacttcggcgtggcgctggagcgtaccgtgaccgaactgctgcaaggtcgtagcctgaaagatctcgacgtgtttacgccgccgacctttgatgacgaagaggtcgccgagcacaccaacctcgaaacgcacttcatcgactccagcggtttgatctcctgggatatgttcaaacaggacgcagactggtaagcattatctagcgtaataatcatcgcgcttgtcctgcattaaagatgagagagaacatcctggagcaattgcaggcacaattccactgtcttgattttaataaggttaatttcattctttccgtattaattttcagatttttccctgaatcttaattaattttatcctggttattgaataatagccagttttagataaaacaggcacatgcgggtgtcgtccgacaccggtttgccgataaagccaaaccctttaccctgcggcttactgaggaaacctgcctgcccggccgctgacatgaccagcgaggcatcgatgcggccattcagcagatctccccaggccatattctgatctttataagacaccacggtgacaccgtgcttttcccagtgctctttggcgtaagtttcctgaattgaaccctggagaactttctcatacgctttagggcaaatctcttacatttcgcagggctttcacttacatgtcaatgacgaagggaaaagccttttgcccgcattcaggtataatccccgcagattacgatttctggagacgaccacgtgactacctggaactaccaacagacgcattttgtcactagtgcgcccgatattcgccacctgccctcagacacagggattgaagtggcatgcttctggctgaggacggtgcggcggaacattgttgggcatgatgattacccgctgcaacccaatcaaattcgcgaggatttctaccggcttaagatgcccatagtgtaccgggtcgaaggtcccgccatacattgcctgtaaagaatgcatatcacccatcgataaatacgtctgccagcgccttatggcagagcagcaaagagagactctccagctccattaagtattgtgaggtggttagaaacatttaaaccgcgtcagatatatcctggtagatgtttttcgagattatttttaggaatatcctcaggaagacattgcaaacactgcgggttattatttgcgtggaagttcgctaacaatatccgctaacagattgaatatctcactgaataaatgttcgcagaagggggcgataagtggcatcaataatgacattcatcgccacgtcgcacccgccgatcaaatgcaccgttttacccgcttcgcgcagcggatcggccagatcgcgctttggctcctgtccggcgcacaaaatcacatgatccacgcgcagcagctgcggttcactaccgatcatcacatgcagcccgtcgtcgtcgatcttctggtagctcaccgccgggatcatcttcaccccgtgcgagaggagggtggcgcatcttcgccagcacatctacggaaaagctcatctctgcctcactgtcattttgacaatacatagtgtcatattgacaatttttaagatagtcaaaatgactacctatttgggagcatcaaaatataaattcattattttcaataagttaaaaagctggcacgcaacttgatatatgacagtcatcttatttgaaaacgccgtattaagttgaggttgctattgaataaggatggagaacagggccagcagggtgaacactttggtgaaggccgatccgaagaaaccactccagatttcccacgtcagcgtcccgctggtcgcgaagaaaccgatcatatagatgatgtaaagggtgagaacgatggcggtagcacggaccaggatgaagtcatgtacgccgttgcgtcctaatgcggaggcgttgcttaccatacgagaactaattcacatcttccaggcgaatgtgcagtagctggttctgtcgcatccccgtccgcctcagtgcatccagtacagtaagccagaaccaggctggtctcagggcgcttttactcgattccatcacccccatacgctcatcctgctccctcgcctccatgtgcagatagattttattcatctgaacatcggtcagcgtctttttacgtttaacatcgggccggtgaagcacagcaccgataccttccagagacaggctcatttcggtattgaactgttcggtgttacgtggagagagataattagtgtgcggatcaatttcgtgcgcaaacgcggtcatcgccagcgagaaaacatcttcactgttggtctgcgccagacggcgaatagcgaacttgtagcgacggtttaacgtctcacggatctctttttcgtctttgcctgtgtgcggcgtaaagtagctcaggctaaagccgacaaaggtcaggaagaacagggtgaccagcagtaacagcagccgacgcaaggtaaatataatcatggtttcttcacctcttgttctttctcacgggtgacgcccgcgaaggaggcgttaccaaacgggctgagtaccagccctttaatatcgtaacggtaggcctggaggcgcagggaagaggcaagcggacgcgacgctgactgtattcacccgcctttttaaacgggccatatgaaggcgtcatgataagaatactgtcatccttgtcggtcagaagcgggacgagacggttcagcgcgggaataatgcccggagacagcacaatgtcttccgttttgaaacggtgaccatattgtcgctcacaccagctgccaaagatctcatagtattcttcatcgtagattttagtaagttggatcatgaataaagaaaattataccgcgctggattatatcaatgatgctattgatgcaattaatagtcgattagagcaatatcctacatttctttatatgttatggagaagaatcagtaagattatattaaatctattcttattggtgttgaaaaatataaaagtaaattacacacattgaatctcggagtgcgtgcgtccaaagagtttgataggacgctgcaacgttttttagcgtttacagtaaagagaaaatttaaatgcggcgcgtattcagaaatgcaggggcgggatacaaaaaaagcaccctaaggtgctttctttaaactcagtttaaccctgatgattaaactcagttaccgtaaatattggcgcgatcgcgcagttctttacccggcttaaagtgcggaacatactttccttccagctccactgatcataacgaatgttgttgtcaccagtattaacatccaaaactattcctgctggtacccttgggtacattatttctgcgagctcagcaaaaattttatcgtattctgaaagaggatttgtagaagcatagtttaccgctaatctgtcttgttcaacttttcgttctcttagattttgagctttctgttgaagattaatagaaaaatttaaataatcatgctattattgaaaagtgatgtgttttttacaaattatttcgaatttcattattaagaattttttagaacgatttaatttattgagagcgccaagatttaccttggcgttctcttctgttatgttgctcactgatctgccggtttctgtcctaatgacttttgcccattcagccatgtaacgtttcgtaatctatctaaggcgaacacttttttcctagcaattgtcttttttttgtggagagaggtgtgtttcacactagagaaccaactaaagtacattagtaaagattgaaagtcccaaccgacattactacaaactatttacaaggtactaaatggggattacctaagtggaagcgccatttatggctatagaggatgatttcaaggtaaaaaccaagaaatgtggctcttgaatattccatatggtaacggagcctttcgcttacaaattattgagatcaagcacatctcgcatatcaaaaagacccttttccttcgcgttaagccacaaagcggcgcgaactgcaccattcgcaaacgtcatgcggcttgacgctttgtgggtaatctcaacacgttcgccaatatcggcgaacatcgccgtatgttcaccgacgatatcgcctgcacgaacggttgcgaaaccaattgtcccggctttagaaaatgcaagagtagttcaaattgaaccactcatgtttgacattaaactaccgcaaaacgaacgctatacacattgtgaatatgtagatctaacatatgaaaaaataacatggcattacatagatggaaacatcattcattctgatacctggaaggaacgcgcttaaggagaaagtatgtcctgggaatataatgtaaaagagcacaaattttcggaagctgccgtttatgtaatttaaataattttttaagtccttagaagggggacgaattgagataaataaaggcagagcctacgatattattaaatttaaaaatatccccgtttactttaagaaaaatcgttctgtcttcaatgctaactttcacgccaggatcggtggtgacaaggaaaggttcataaccatttttaatgtcttctaaaaaaacttcaaaagccggcattcgccggcttcttatcactcaatgttcgtcagtatcgccgggatggtgtcatccttgcgcaacgtcataatttcgcagccgttgtctgtaaccacaatagtatgctcgtactgggcagacaagcttctgtctttggtttttaccgtccagccatctttcatggtacggatgcggtaatcacccgcgttgaccattggctcgatcgtgatcaaaaagtgcatttaatttgcatgttatcaataataaccgttttgctttacccggcgttgttacacaaggtactcagttgttattatccatagtatttaagtggttatgatgtaacgaaaaaacttgatctgtgtcaacatatgacgcatattgcgtgcggttatttttcggctcaggtaaacagaatgacgttgtatcaaaagatgttggtgttctcataattagcgtggagatactctgcaaccgatgtgtttaatgatgccagcgcatggttaattttctgttttgccctggaaagaatattcagttgcgatgactgattcgtgttgtctgggtcagccacgatgagtaaccgccctggttttaaccaaggtgtgtcattgtttatttgcataaagtatctagcggcttcgctatttacattattaaacaatataagaacatgctgctgtggatcaacgatgcgctgatggcggtgttcttcctgctggtgggcctggaagttaaacgtgagctggtgagcggttcgcttgccagccgtcagcgtgcggcgtttccggtgatcgcggctattggcgggatgatcgttccggcgttgctctttctcgcatttgcgtggcaggatccggttgctcgtgacggctgggggatcccccagcgcttctttcagctcggtacggtcatcgccttcgatacggcgagagatgccacccgcacgcgggttgtttggcatcaacaccagatagcttcctgccagactgataaaggtggtcagtgcggcacctttgttgccacgctcttctttatcgatctggacgataacttcctgaccttcacgcagaacatctttaatgttcggacggccatgggagtacgaaggtggtggcgcagctggccatgtcgcaggccgcctgagtggtacgtgagcggccattcatccttgcccgcgtttcacgcagcagagactgagccttacgtttcgcggcatctgcttcgtccttcgcgtcagagccccaggatttcaatacggcttccagcgtgtccgctaattggctgacatcgttacgaatatcctgtgtgtcgtcattaatagcgacaagatgaagctcgccgccgccgtgaatgaccagacccggctgacgcggcacggcgaacttttctttataaggggagcggatatcgcctatctgctcgaactgaaatgaactcatttcgccgtaatgttaagcgcagaaccgatacataccgcctgacgatagcaacctggtgtgccgctggtgacttcacagctgtgcagcaacaccgcgttgggagggttactgcattgtgacgaactgctcaaacagtgaagtatccacccggttcatatacttgaaagaaaagtgcgaagaagcgaactctatatacagggttaagcattctgcactataactaattaaagaaagttaaactcctggtgatttgtttgctgccattttcacttctttcagaattgaattcaggtgtatgagttaaaaaagacttttgggccaggtataaacccgaacgcctgatggcatcgtaaatccaaaaacaagagcgagaacaaaatgcactttagaagcaatctcatgcttaatacggcgaggatcccacgcaccgcgaagcgcgcagaacattaagcaaaaaggttgccagaatggttaatcccttgaccgggtcacaacacgttgagtatagagcgccgttttatgcgcctttgcgggatatgtgtataaacgtgcacagattttaaaaaccataaagtatattataatgggttgaattatttggctttgtattattctaagccagccggtaaaaagtatgatctctgctaaaaacataagacttccctaagccagaattttttctgaagaaaacttgcttcgtgtcacgcgcgtggcaaagggcattgtcttttttgtctgaagaagccggttcagggggcgaccgcagcgagaatgcggactatcagtacaataaaaagcgactgcgcgaaatcgatcgccgggtacgctacctgacgaagtgtctcgagaatctcaaaattgtcgattactccccgcagcaggaaggtaaagtgttcttcggcgcgtgggtcgaaattgaaaacgacaacggcgataccctgcgttttcgtatcgtcggctatgatgaaatttctgcaaaatctgtttgtgttgacgtcatgcaggcctggatcgccggcacagaaacgccgcgttacagacatgccttacggcaggcgataaagctgtttctggccggatgtgccgggatacttaaatccaccaaagcgacggagtatgtcgcttaccctttacttaccgcagccggtgtcgggtcatcggttccctctaatctggcattccagcatttttctgtatcaggacgattttcggaaaaggtggaggctgtctggcggaagttcagtcagtagcatgatgatttatctgaatttttcggaaaaatgattaccgaatcttacggtttcagtcatttacgcttaacggattcgcttatatactcgtgggtctgctatcagcaaacagacggatttcatgtatcaacctgtcgcactctttataggcttacgttaatgctgcgggtattattctggttattattggcatcattgcctggggcgtttatgttgcagtaagagcattaattaaccttaatgagcaatttattgaatctatggcgaatccggccggaatcatcggtctgttctttggtttactgatagccgttgcgttgataatacgaattttcatttaccggggtttccggaagaaaacagcagaactcgaacagtttctacctctaaaggtgttatgactgatcgtgcagcgcgccaggctggtcttggtggcgaaattatctgctacgtagcctaatcggaggaaagaatgtctcgtgttgctaaagcaccggtcgttattcctgccggcgttgatgtaaaaatcgacggtcaggttattacgatcaaaggtaaaaacggcgagctgactcgtaccctcaacaaagctgtattgtgttaggaaccgtcagattcacttccgggttaaattccgaaagtacgctgttgaagttatttttattgacgttaattttctccctttccgataatgggcgattctcttttccattactgaaatcaccgacggtgaggagtttaagtggcagttcgattttcttttgcgcgccacctgtatgcagagccagctttaaatttatgcgtgccttgggtcatcatccggtgaggttgtttcagataccgtacccggtttaatcgccgtgctgcgatcgctgttataaagcttcacgccgacacccgtcgccataccttcacctggcgtaacctgaagcagtgtgtcattcaccgtatctttggttccgtcaaacagtaccgcaaccgattcaaccgtctccgggcagttttccacgttgattttgaactcgcgcgtaacagtgcccttgtggagggaaccgagaacggtatcaatgtaaaagatactgcaaaattggatatcaagaatagcggaacgattagtggtaatacagccgctattatttttgccagcaataaaaataacacgctggtgcttgatacgggttccgtccttgtcggtgacgttatttccaccaattccacgggaaacaccctcactctgatcggcaccattgtgccgagccattttctgagtcacagccagaattatttatgctagggctttcatattcccgctatggagctgctcattatagtaagaacctgtctgacaaagttttcattggtcaggcgaaccttatccgtcatggttatcatcagggaggaaaagctggatacggaatgcgaagactgcttgtggacgagaaaggaaaagcaaaagatattttgcttgaaaaaatcagcgggggtggttatggcgacaagcgtctctcgcctaaagagagtgaagttctgcgtctgttcgctgaaggtttcctggtcactgaaatcgccaagaagctgaaccgcagtattaaaaccatcagtagccagaaaaaatccgcgatgatgaagctgggtgtggataacgatatcgccctgctgaactatctctcttccgtgacgggctcgtttaacagggcgtgcatggtcgcccatgcgatatccgcgtggctggcttcctcactgcggctggcttcataggtggcactgcgaccgctgctggtcatggttttgcggatagccatgaatgactgcgtgatgtcggtcgcaccggcgtcatactccagacacccgcgtcggatggtgtccttcgctttcagcaccattgcggttttcatttttacatagaatgtgcacggaaattaaacctgcctcatatttggagcaaatatggaccgcgtccttcattttgtcctggcacttgttgtcgttactgcacttgcattgctggtcagcacagaccgcaaaaaaattcgtattcgctatgttgtccagctgctggtcattgaagttttacttgcgtggttcttcctgaactccaacgtaggcctcggcttaacctttgccatctctgtcccactaagtaaatttccgccaattgcgataaaaagaaatataagaccagagtccataatctggtccacagtaaaaatgaggctttgtgcttttttattgtatgtcatagatcgataaaattcgactgattagcatcttttactgataagctaggtttttcacttaaaggccaattaataccaatcgttgtatcatccctcttgcattagctttgaataaagttgagggttatttttacgcttttgattatctaacttgcgtttttggttgtatatttccatttgttcagaggttaaagcacttcccgtactgcggatagtaccagatgtagctaacggcttcttaccgttaatattcctttttacttgctctttactaactctaactttagctgtaggagcttttataacgaaataagagcgtgcagtgattgattatgccgccagtctggttaacaaaaatcgtactgacttcatcattgagaaggctgtgcacgaggcgcagaacataatcctggatcaacgcgtgttcgttcttgatgacgcccgttaccaggcattcattaagcagctggaagcgcctgtacagaatgttgaaggtcgtcagcggctgatggatgtgaaacctgaatgaatccttcccctgcgccgctatcgtctggtttaccagactgatggcatcttcattacgatccgtattaacccaccagactcctccgactggcatgtggcgcaattcgtcccataatgactggatgccaatagaaaatatggagtccacggcgtccctcttttcgtcgaatttctatgtctctcagtttactagcgcaagcgtagcgataaacctaacattggatgcctgcccggagccgcgaggcttataccagccaggactggggttataagctttctgctcaccggatctggattttgagtatggaaagtcatttttgtattcactgtgatgtttgttttatctgttgttgcatgttatttttatgcgaaacgtaaacacagagaaggttgtcatatgttcagaatcacacagttgatacaaagcctggtcaaagttaatgccgccgggggacacggttttgtattgaaaagcgagccacctgagatgttctcgcgggccgttttcgcgctcactgataatcagacctggtttcctgagggaaacgaaatttccgttaaggccaataatgagaagttaagtaaatttaacttaacgccgcgacaaatagacgtgttaaatatgattatgcgcggcctgccaaataaacgtttagttctaaaccttacccctcgcccctcaccccaaaggggagagggaacttgaacaccctctcccctttggggagagggctagggtgaggggggaaaggatcaaaagattttcgagaacttatcaatattgctggcatcgtagacgaacggctcggccatcgcgccgttgccgtccgcatccagcttcactttgcccagtttgcccatgctggcccattcttctgagtgacagtctgagcgtggatggtctggcgcaggatatcgctgaaaccttcacgatgtaccagcgctacatgagcgggttcgctgatgtaatgaacgggacatctgatgtcaccataactatcaatggcactgccgttaccgtaccgggtcaaaaatcgctggcgaagaaaggtgcaaacaaagacattaccagcctgagcggattgatttttagaaaaatagacatttccataaagaaagtatacattcagaacacaagaataaaaggatttccacaccagacctttgccccttagtcttcgcagtaaggaaaggcgcctgtgttagcctattcggactagccagtctgtttgcgaagtgggggcaaacagaaggaaggcattaaacgggattttatactatggtaaaaaacattatttatcagtgttgctgtgggcgtcaattatatcagcgaagcatcaggggttgattccctgaaaaatgccctgggatacagtcagtgggttaagattgcgatccctggtggaagtgggtgggtcgatgtctgtactaataatataatgacttacagcgaggccgaactacctgactgggcaggatggtctctgattgatgacgacgcatccagcgatagccactgttgctgtgcgtacagacaaagcgaaaaccaaataaataaagaatggcctcaggtacttgtgcctgaggcctctcctcatctttatgccgtgtagatgtcgatcagcctggcaatgaaatgccccagagtcatcaattctgaacgaacagcttcagggtattttttgtgcagggaagaggggacaaccagtgtgacccgttcttgctgcatttcattgcggggaattatcgccaccacgttgcgctgaaacatttgctcaacccaacgccgctcttttttcgttaacaccaacaccacgcgcgacgttggaaagcgatccataatctcttccagtaaagccacaccattatcacgaattaaattcccatctatcatgacgatagcggagggtgacgcggataattgcgcccataattcatcagtctgacgatacaaccttgccaaggttggggtcgcgggttcgaatcccgtcttccgctccaattttcaatatgacatgccggggtggcggaacaggcagacgcacaggacttaaaatcctgcggtgggtgaccaccgtgcgggttcgacccccgccctcggcaccatatgcgcccgtagctcaattggatagagcgtttgactacggatcaagaggttaggggtgtggaatcagcccgactgcatggggatctggctggctgctttaaaataaagctgagagcatctggttttcgtttgatttacaaggttatcgatgacgagattgttatatgggtggtcgcagtaggtaaacgggaagacgaaaaagcctatgaaacggcccgaaagcgtcttttataaaagaaatacaaacgtattgcatttgtattcaagatatcgatcccggcgccgttgtgcccggcttggtgcccgacgtattcagatgcagcttaccgcctgtggtgatatacccatccccttccacaaagaagttaaactctttgccgatcaggttaattttgccgttagcgttaagctcaatagcactctcgcccgagaccagccgcagcttcgtcccggaagcaatgacgtactgctctaccgccgcatccaggtattcaggttaaaaccggccaggcggtacgctttgtagcgttcgcgcgccagttgtttcaaagattcttcgtaagggacaaagtctaccacttctgtgaaagcggtggcaaaatctgcaaagtctgtccgcaggctaatgagaatatcgcgcgcgctactgttgcgtttttgcggccaggcaatctccaccggtgccccgccgcgtggaccttcctgccagtcacctttcgtaaaaccttcccaggctgtggctaacttttcattaagctcggacatgtaacacctaccttcttaagtggattttttatttactgcctgagacaaccattaatgatgatcgccgccacgcaggtaaatgacccagtatgtcaacccaactaacagacccccaccgataatgttcccgatagtgacggggatcaggttattggggctgaacgcggaccaggtctacaaaacgctgctggtcgcggtgaacggcgatatgaagcacctcgccgtagcagtaacgcccgtcgccggacagcttgatctgaagaaagtggccaaagcgctgggagcgaaaaaggtcgatatggcagacccgatggttgcgcaacgcgcaacgggttatctggtcggcgggatcagcccgctcggtcagatgtgaccagctgtcgccgaaatcgtaaagatacgagaatgatttcccctttgtgcggatcaaatcacataaccggaaaatcgcctcattctttccctgctccggttcttcagggtcttcggtaaatcgtcttttgccaaataaaaactcgtgcaaatgtgagtcctgccatcccatgacaacctgaatgacatcgtgcagacgatccagtgaaaattgcagtggcactggctggcttcgctaccgtagcgcaggccgctccgaaagataatacctggtatgcaggtggtaaactgggctggtctcagttccatgacaccggttggtacaacagcagcctgaacaacgatggccctactcacgagagccagctgggtgcaggtgcgttcggtggctatcaggttaacccgtatgttggctttgaaatgggagcagattggtaacgttgaacaatatgctctgacgataaagaatgttatcgatatctacgcccaccgacagatacctaaatatcgcgatatccataaagaaccctacgtgattttcgttgtaaaccttaaaggtggtgtatcaaaaacagtcagtacagttactcttgcacatgcgctgcgtgtacatcaggacctgctgcggcatgatcttcgcccgagtgtatcgagaagatagaaagcatacttcgcgacttacaaaaagtttagcctgtttaatgatacaagcgagcgttatcattaatttccaatatccttaatgcgttacatgctgcttcggaatatagacatccggagcagctattctctgcactctagcccagtgttgttaaaaaggtctgttttcttctctcaacctgattgttaccataaccgcgggtcctgcgaggatagccagacccgccagggccagcagcaggttgttttgcagcacgcgtgacaacagccacaggacgatcattgccgcaccaaaataccaggtggtggtgagctcttcgagcacatctcccacttcgcgccagcgcgcgtcgtgatgacgctgtaaaaacagcatcgacagcacggtcacgccgtaaaccacgcataacggttttgctgaacaccctgcggttcatagccttcgacctggcacacaggttgctgctctggcagtgaggtgcgaaaaattctcttccgggagcctccactactcatacgaacggctcttatcctgtgctaaaaaacgaaaggacggcatgccatgaatatattcgatcactatcgccagcgctacgaagctgccaaggacgaagagttcacacttccatttcttacagtgaggtgttcgaaataaccttccactcgtctgaacagcaccgcgccattcagaaacaaaccgatatagacagccagcatcagacacaatctttgctgggtaagagacctaatatatttcatgcaaacaaccctgggggaaggggtataaagacccgccgaatctcagtgagaaagctgacagagtaagtagatgcgagagagaggttatttttctgcgtaataagttaccagccccggcatgatacttggggtcataaacggctccagaagcttctatatgccatacttttgagcagcttgcgagcttggctccactatcatgaagttgctggtaacatgccatcatttgatcatcaaagtcataaaaaagaacagtagtctttcttagctgatcgtacatgtaagcaaaaacagcttaacgcgtgaaattggcatctctaacttcaccatcccgttgatggaaagggccatcgccgcagtgggtaaagagaatattgctactaaccagattgaactctctccttacctgcaaaaccgcaaagtcgtggactgggcgaaacagcatagtattcacatcacctcgtacatgacgctggcatatggtaaggcgctgaaagatgaagtgatctggcgctcggtcagaacatgcgcgtagcgttcatgccgtggaacggttacaacttcgaagactccatcctcgtctcagagcgtgtggttcaggaagatcgtttcaccaccatccacattcaggaactggcatgtgtgtcccgtgacaccaagctggggccagaagagatcactgccgacatccctaacgtgggtgaagctgcgctctccaaacagaccaaacggattcagcaactggaagaagttaccggtgtagaacagacgcatatattcgtcgacgtggaacggtacgccctgcaacaggttaccgaacgccacacaaatgacaagcggtggaaagaagctaccgatgaagatgccccagtcccacatgttacgccagcgggtgtcttcaatcttggaacggtagtcgaaacccaccggacggacttttataaaaatatgttgaaatggcgaatgcacctagtgcttgtaggatgataattgccagcgttcccgttcctaccatccacatatataactcactgaccggatcagcccgtaaaaacataaaacccgtgagtagcaggaacagggaaagggacagtaccaggctggagatatacgggctgtggaattttttatgaactgaagaaaaggtttgtgcgttttaacgttcgcggtatttagtgctcagataatcaccatcctgtaagaaaatttacccattctgaataaaacttaatcactgagtgttgcgaaatatgaagataattgtgctgcatcatggcgagtagcataaatttctctgctgaaaactcacggtcagggtttttttaatctttgtttgcggtttctcacactccacgtaaatcccgtctctgatagtaagaccacttactgatcccataaaccagcagtaaccagtaatcagctaaaatagaggcttgctgctcaagagagtaatcagtgagcttttctttatccagcctgtaggtatattcagcagcccagctaaacgcaccctgcattctcacccattgcccgtgctggtgttgccacacatgccccaattcatggatgaaaacatactcactgatgagatccatgttctgtaagcctgatgttgttctcgtgctaggtgtttcaggttgtatttttttgcctctttttaaattcttttcttcagctaagattattacaaatattgatgggcttgaatggcgacgtgataaatgggggaaatttgcaaaatggttcttgaaatattcggaaaaaattgcggttcattattctgatactatcaattgaggaagatccacacttttataaaaaatatgtcctctattacagtgctgcggaggaaagtgcaatcaccaatttcacctacgacaaactggtatctgtgattgctgacaaaaaggaatttcttgaatataaagaaaaccctcttgttgccacacaatacagttttgctgcgaagacctttatcaagctcccattcttagagctacctaataaagtgaattttcatcggttgctattgttttgtttaggcaaagttattatccatattgtgccaacagcaacaacgacgtaagattattcctactatttttagtggtgctaaattctcttttagcaaccgttaagtatccatatatctcatatcagtaaagcattataaatccctgtaatttgcattaagtaaaagctaactccatggtaacatactgatcatgttgtcaggttccacggttctgtcgtcaaatacggctttcgggataataacgtcgattttcccggttttatcctggaatacgtatttatcgccattgccatcaataagattgccgcgcagtgaaatagaggcgccgtcatgcatctctttcgcctgagtaatggtcataatgcgcgcatcatcggtaccacgataaccgctggcaaacacccagagcgggtttattcatcttgctattctgggtgtagaagcaacggtaagcatcacccagcgccattgaattaacttgcttgatgaattttgggaaagcctgccggatcgctttatcgtaaagaccgctaatacgaagagctctctttaaatcctctatggactccgcaacatacgcaataggagaaagtggggaattttggtcgatttagttcatctttatgctgtgaatgctctgcatacacttgcacttgacgtaaacggcaaatactcttagtgagtaaatgtttgccgtggtggcaaggtgttagaacaacagagaatataatgatgcaggatttgcgtctgatattaatcattgtgggcgcgatcgccataatcgctttactggtacatggtttctggaccagccgtaaagccatatctacattcaatgtaggatttaaaactgagcatgccttcacataaactgtgaaactattaacattaatgttaagtaattgaattccatcagatgtcccccacctgacgatagttcctgccgggactacaccaccatttgaaattttaccattttgatagagatgtacatttaggctcccaatatctaaccatcgaggaaatccatgatctgctccggtgatgagaccagctcgcaatagtggctgcattcacggaacagctcctgcggatgcgtctcctgaaaatagccgctaccgatttcagatgacggaatgtgagccgcaatcgccagcaccggaacatggttgcggtgacagtcgaacagaccgttgatgaggtgcaggtttcctggtccgcaggaacccgcacatacagcgagttcttcctggctgaccgcttcgccgtaacgcaccaggccggagctacggtgacccttccgttcgttatccagaatgggcaggtgttcatcagagacgcgctgataggtgatggcaccatcagcaacgccaagatcggcaactacatccagtccaataactatgttgctggctcagtcgggtggaggctggataagggcggtacgtttgagaactctgttggatctcgttagcgaccttggtatacccgttcgacaggtcggccatacgacctcccggttgttcggttctgtgggggaaattgataatttcagctgtgtttgacatacttagctccgcaattacactccgtttttgcacctgaaagccgttggtgttcgagcaccgcggctttcgccttttctgaagtcttcacattgcccccagcaagtttggtggtcagcgccgtggcggcattgggtcgcgccagtttcagataacgcgcgcgatcgccccgcggtttcgtctggacattcacccggcggcctgccagctctgaaagcgactccgccagcagggttttatcgtcgagcgtgaagtctagaaggatctccgagggcagcgtacgcatctggctgccctgcaaataaaactggccgacatcgggccgacgcgtgagtccaggctcagatgaaaatcccagttctgccagtgcaccctatccccggtgatggtgtagttcttgccttccggctcgataatctccagcggttttttcaccgtttcaacgcggtcacggccatcataagggcgcggcgtgagcggcaccggcacgaccgggccttcctcaatcttctggattttcttctgctcaaactgataataataacgctcttctcttcatttattggtattgaattattaacaaatgccatgaggcaagggttttcaattgcaatactttttttatctttttcattttatttcaaacgacgctatgtttcttttggagtcctggctgcactatctctactttttcatcaggcatctgcactaattattgttatatttataatatcaaggtttaatgtcttaattgaatatgaaaagtttcgtgaccagttgatctggcacggcttagaaatggaacagctcttgaacagcaaatcattaatggtcattcttacggaaaatagctggttatatatgggcgtttcggccctcatgccggaattaatctgtgtgcattcacgttttagtgacagccagctgcctgatattatcacggaggctgaacgttcccgtatgtcggcaccacttaccgtctgaccgaacacttccactactggaccaagcacgcgctgctgaatgccatcgcgcagccggaacagtttgtggagataagcgaaaccctggcgaaggcgaaaggcattgccaatggcgatcgcgtgaaggtcagcagcaagcgcggctttattcgcgcggtggcggtggtcacccgtcgtctgcaaacaacaccgaaggttctgacaatcagtcctggacgcgtctggccttcgcgggcgtgaaagtgggcgattacggctccttcgattacggccgcaactatggcgtcctgtacgacgttgaaggctggaccgatatgctgccagaatttggtggcgactcttatacttatgccgataactttatgaccggtcgtgcaaacggcgtggcgacctagagttgtgtgataatttaccgcaccattcagaggcgctcaacgtgtgattcacgtgtttttaacatacgcctgacgaggggaaataatggaaccgaattttacgccagaacagattgaaatgattaaccgcattgttttcgagaagatcgaaataatccatgattaagccgcgagccgtttccggcccgcggcggcatgacaggtgatgaggacagcattcgggcagttaagcagaaagtttccattccggttatcgcgaatggcgacattactgacccgcttaaagccagagctgtgctcgactatacgggagctgatgctctgatgataggacgtgccgctcagggaagaccctggatctttcgggaaatccagcattatctggacactggggagctgcttgccccgctgcctctggcagcacttctccctttataaatggtatgaatagtttaacgctgattattccggttgacaccagcgcgatgaaattaaatgatttttttgcatgctccagaacacagggggcatgacgccaggcgcgggtaatataaacggacttgttttcgcaagcttctgcaatccggataaaacagccatccgtttatgaaatgttgaaggcgagtcgcttttgatactgaaggtaaaaaatgaattaccgaaagaatcatgcatttcataagaaactttgtattgttcgatggatatattcggattagcgttcgttaaatcgttgaacttaacccagacaaaaagccctctgtactaacagaatacaatcagaagaatcgaattcaactttaggaaaaacagatagttatatgaactttattcagtactttttgtcaacatactcgttgaaaaacgtggcgcgtacggatcgtttttaagcacaattactgtgccagaagcgatcaggcgagaccatagatacatcaactgctgtttactgggggcagtgatgtgtcatatggatatccccggtctggacgctcttatgaatatctccgctacgatccttctggcttttggcatgtccatggacgcatttgcccgcgattgatgacagaaagatcgcgagtttaaaccgtttgttgaggtcaactggctccataacacccgtaattttggcacccgaatggatggggtcagtattcgccaagccggagcgcgcaacatgggtgaaattaaaaccgggattgaggggaatattaatccgaaactcaatatctggggcaacactggcgtccagattgggggtaaggagcgaactggaaaccatgtgccgcgactggccattcttctctacccgtctgggaatgctggagatggtcttctcgaaggccgacctgtggctggcggaatactacgatcagcgcctggtgaagccggagctgtgggcgctgggcaaagagctgcgcgaactgctggaaggcgacatcaaagtggtgctggacatcgccaatgactcccaccggcgtacgcgtgaccattccggcgatcggtaaactggcgcagaaggggagtaatggagctatcccgattgggcagggcgggaccggggcaacgaatgccgctgacgctcgcacaaacctcggtttaggaagtagtgcgacacgggatgcttacagctcgacaggacagatgttatcccggggagattttggcttgggcgggccgggtaatacgttgtttagaaattccaagcttttaacaattgccatctcacaacttctttttggtctaaaaccataactgaattcactgaactgcttctcaaatatcgggctgagtatttgatgaatggcttgttgaacgactctatccactactgttggtattcccagcttgcgcatcttgccattctcttttgggatttccactcttaaggcagcttgaggtgagtagtcacattccttgatcgaactgtctttgaatgctaaattcctgttcgtataaagaattttgatggctggccacgccgtaaggtggcagggaactggttctgatgaggtgtctacccgggaccagaaaagacaaaaccccgataatcttcacaaggtttggcgactcagagaagactaacggggcttacctaaactgtatagaataaacacattgaaaggataacttatgaacaagactcaactgattgatgtaattgcggacaaggctgatctgtctaaagtgcaggctaaagctgctctggaatctaccctggctgctattactgagtctctgaaagaaggcgatgctgtacaactggttggtttcggtaccttcaaagtgaaccaccgcgctgagcgtactggccgcaacccgcacgagccgcctgccctgctccggcaagcgcggtatcttcggtgccggcttcataaaaatagagggcgctggcatgggcactggagacagctaatacgccagcgcacaggaggagtcgtgttttcatctgtggtccgggaaataaaaaatttgccgacagatataacaggggcgattgattacgtaaaaagaaagagggtttaattttacaccgttgccccacgcgctagcgcatcgagctcccaccgttccggggtaatgccctcctgagccaaatcgcaacggattttcgcgacgcgatccctttcgtgtttcgtcatcctggctgatggcgccagctcgctcgttttgagcggcgcattgcttctttgctgtcgatttttgcgcggcgccccagcttttaacgccccgctaagcaccggcgaaagaggttgagcaggcactgctggaagtgattgccgaattcggcggtatggatgccgaaacggcggatgaatttttaagtgagctgcgcgtagagcgccgttatcagcgagatgtctactaatgagcgaaaaacatcctggcccactggtggtcgaaggcaaactgtctgatgccgagcgcatgaaggtagagagcaactacctgcgagtgaaactgtagggtgctttagtgcagggaagacgaatgttaaattcttccaaatgactcaggatggattagatattggatatgttaagtacgaacatgcaaaatcggcaattccattgcttttcgtaaaaacagaagaagaacaagattctgcttaccgtccctcatcttttacaaccgattggaatgaaatgctgaacggaaaagtaactttttaacgagaaaagttttattaccttgccgcccgtcttataaacgaaatcgtcttcctttatatttcccacggaaataactttaaggtcccgggaaaaggaacgcatgatcctgtttttgataaacaggttatccggtgttttcatcagagagaaaactgcccacagaataccgagaccggtcaggagcgcgagcccggtcgtcacgggatcgccccaaaagcgatacgcccccgcagtgatgccggcgccagcaacgtatagtcttctcccacgtccggaacgtcatcgccggttcccgcaagctgtttacgcagggtggggaagggaatgtccttgtttctgagcggcttttgtccgcgcgcgtcgataaacacgtcgaagcggtaacttttttttgccgtggtgatgacggtcctctgcggaactggcggcggttgcggcgctgattggcaaactgccaacgccggaagagtaccagacctttgtggctcaggtggataagacggcggtggatacctatcgctacctgaacttcgaccagctctctcagtacaccgagaaggcagacggggtgatcttccagacggcggtataaacagcaaaaccgtctctacgagccggtttggcctgcatcggcctcaagccataagtaaacaggtatagccatctcaatctccttttatagactgagggaaactactcttcattatggatttaaattgtgacatttatttcaaaatagaaaataaaataaaatatggaagtgggacttaaaattgctctttgcgatgtataagtttctcaaatatatttccaaaaattataacattgaattctcatgcatcaggacaatgtaatcacgcttaacttttttgacctgccgaatggttttattgcgtaacttatcctgttcaatcgcaatgataaaatccatcgcctgatcgaccccatcaagatcgtgaatatccgcgtcatcgcgaatcaaatgggttgatgtcagggagcttgatacaccatggcaaaggtaatagttatcactgataacgttcacgaacgatatcagcgtaagcgctgatgttcgcggcacttggcgtgttttttgacagttctgccagataggcaaatccgccgacgctgtcgagctgtcccagacgctccagcgattctgcgagcgtaatcaggtcgatcgggctgcccgactcctgcaaacgcgccatttccgtaaagatgtggcggtgcgggcgggtatagaagcgggtgtgcagaccgttcggagcggtaatggtaacttcttgctggaacattgtatttccccaacttataggtttagtgttgtggaactaaagtctagcctggcgacttaactttagcctgtatagttagcgctgacgtttcaatcgtcattaaacattatgcagtgaaagcaagacttgaaccaaatcataaaatcgattcagcagcgctaaaattaccaccgcattctcgaaagcatggatcaggtaaaaacgcgtaaaaacttttctgattctgataactgacaactaagctaagcgtcgctaaaatcgtccccttttttcaggttccggcagcgtaatgccggatcaggaacgacaaaacaatggcctggaggctaccttgttaaactcatttaaactttcgcttcaatacattctgggatacgggaggcaatacgatccggatggaacggctccagcgcttcggttttttcgcccacgccgaggaacttaattggcttaccggtaatatgacgaatagacagcgccgcaccgccgcgggcatcgccgtcgactttggtcagcaccacgccggttaacggcagggcttcgttaaacgcttttgcggtgtttgccgcatcctgaccggaaacctacatttccgggataggtactgcggcggataaatcagactcggccatcggtatggggctgggcaccagtattctggatatgtatgaaggcgtggtgacgaaaactgacgaggcaatggcagggatcacccgtgtgctatcagagtttatggaattcaacgtaaaccctgatttttgcatagccaaaattcagtttgatgtctttgtggctcaagtctttatttgatgttaacgaacgctggtgattcgctgggaagttacaactcactccgcccgttgtatgtgaatctcaccacaggcgcgcttcagtcaggaacgccgctgtcggtatacaacacaatcactgcgagcgaagaaattaccgcaggcaaaggaatggttgcgggttatagcggtccatttgcctgggctgaacaggaagataagtttactgacgatcagttaatcgattttatgcttcagcatccgatcctgattaaccgcccgattgtggtgacagcgttgggaacgcgtctgtgccgcccttccgaagtggtactggatattcttccggatgcgcaaaaaggcgcatttgctaaggaagacggcgagaaagtcgttgatgaaacaggtaagcgattgaaataccacgcagataaacggcatcacggcgaccatcaacgggcatacgtcagccattaccactaacgctcaggccattgcgaacgttaacggggacctgaaggcgatgtacagcatcaaggtcgggttatccagcaatggtcagctttacgcggcagggatggggatcggcgtggagaatacgccgtccggcatgcagtcgcaggttatcttccttgcttatttgacgtgcatcgataatctttgtataaataagatcagcggccgaactgtctcctgtaggtttagttgaataaaaagtcattattgtagccagtcgcagtgcctgctctattgcttttgacgcaaaatctcggatatgtacaaaacgcccgccaggtaaaatagccttttcaatttctttctgtctttcctgaagaaccatgaagtaaatcagcggcttcagacaataccccggctacaaaaaccagataaaacagttcggggaaaagggaaaataccctgagaatgccctctgaaatatgatgaagcgtaaaggcgggtttgataaaaacggtaacgggtattgtaatcagtacggccagaaagaggtaactgaggatcgccagtggccgggaaataaacaatctgaagctggtttaaatctttcccggaaacgctgaaatcccagataaaaagcatgaaaattaccgtgaactgggagaaagcctggcctgcggtaatgattgccttcctggcgggactgcctttgctgctcatcgctggcgtaatacgctggcgtttgaaatggctgaaacagtaccaggcgaagctggcctcggaagtggggcaactgcgtaacgagatagatgatcctgaatcataccaatcgctttatattcacttaactctttttttttcttttgtaaaagaagttgacgcattttaaacatggtagaggaacataggaaaatagcgattagctttccatatagttggcactctaatcgctcttgtttcacattacggtaatggtctattttgaagagtgatttccatgttttaaagacaaggtgaacctagttcgccgtgaccgtcccttaacccgtgatgaacttgctcactatgttcccagcgtgttcgggagtgacaagcatgaatctcgttcagacaggtacacctacatcccgaccatcaccatcctcgaaagcctgctgcgtgaaggctttgagccgttctttgcctgccagacaaaggttcgcgaccagagcaagagggaactctccctgagaaagtaaagccaacacactactgatccatgaagctgtatatcccaactttgaccctatatctttttctgacaaaccagagtttttcattctttgaatttcggcgaagaactcagcatttctgggatttcttctggctatattctcagcaaggctcatcaggtgagctgtttcctcatcaacatgctttattaatgcaggaaacaggaaactgatgagcagtatgatgcgggtcatccgggtgttaaatcgatgtcgttttcgcatacgcgtagcctgactcactttcttttcctgagtatacccttttgggcgatacggctattaaggcacagccgcaagtctgggtcaattcggcgaaatgtaaaataccgtcaatgcttacattaatttatgttattaaaaacaacagacgaagttcaccagaacgaacatccagtactctttacggcgggcacgggcaccaaaaccaaaataggtgcgcagtacctttaaataccagtccatttttccttgcctcataatcagtcaatcacttgttttctaagcgatcgaggtaaggatagatgtatgctgtgaattaaaaaagggaatcaattgattccctaaataattatccaaaattctgtagctatagtgccacgttgtaacataggtgcagcacaccataaacgcccatttcttgtcacataataacgccatctcacaaacgctgcatttgctggtgctttgtctgaacacacagctcgaacccatgtatgatttacaacctggatattcgttctagctgttttaatgcgagtttttttgtcagcagtccaccattcagaggcgcaggaagttgtgcgcgaaatcgtgggaaaaggcggaaaagcggcagcattgcagctcaacgtcggcgatacggcaagcttttcgcgcttggctcaaaaggtgaaagatacccttaaacacgtctggcaacgtgacacctttgactatttagtgaacaacgcaggtacagggttatatgcaccctataccgagacgaccgaggcagctatcggctgttaaccgatcggtcgtaggttcgagtcctacctgcggagccatacagagaagtacccaagtggctcaaggggctcccctgctaagggagtagatcgctaacgcggtgcgagggttcgaatcccttcttctctgccatacatattggcccgttggtcaagtggttaagacaccgccctttcacggcggtaacacgggtctttagattgatacttgcgttaatatccctatcatggtgtgtacgacaagaaggacagtcccattcacgtaggtttagatttttaacgtctttattttgatatccacaacaagaacataattggctggaagcaaatgttttcgatacgacaatgacttgtttgccataccattttgctttgtattctaacatggatcgaaattgcgaccggaagtgcagcacattgtgatccttgctgaacacaggctgctcgatctgcgggaaatagagaaacgcttcaaccagatcaaacctctccggtatccacgctggctggttgtgctgatggtgggactctcctgcgcctgcttctgcaagctcaacgcgggcggctgggacggcgctgtcgtgaccttctttgccagcagcatcgcgatgtttttctttccctgaaaggcaatcttttccacattacctgataagaggaggtttacattgctttcctggtgtgagactgaatccgttgtttgaaactgacggatggcagaggatgccagctcgctcatacgcatctttttactatggggtttatgcattttcttcttcctggttaccctcaggagcactctgctacggatggggcaaaatgcccttgaatctgatggcacgatacctcctgcggtggcggttcctttaatgttgtccaggacgctggcggatctgtcatatgcccagttgtcagagtcatgggaaaatatgcgttacctgcttctcgggtctcctcatggggcaaggtcgtcgctacttctgaaccagctaacggttaagcagttacgcacaatgttcaatggattggggatcctgcgggaaaacaaccccccatgggtggccgacggcatgcgcagcctgggcagctccgtggacaggcgtgagttccagaccatgctggtagagatgcttaacgagaacaacgttgagtttgtccatgtggaagagtcggactacgacacccgtttcctgcgctgcgtcgagctggtgaaggagatgatgggggagcaggggctctcttacttgttgattagacaacattctatcattctctaataacaaagatgccacaccagctacatgagcggctgccattgaagtaccactatcaaatctataagaaccatcattccaagtactccaaatatctacacctggtgccattaattctaactgttctcctttactagataagaaccctcgttgatctttagcatctaacctaagcacaagcaatttagcatattgcatgcaaagagcgggcgaaattgaccgacagcaggtagacttaggcacaaataacgcgtctttatgaagaggaactaatgacgtatcaacaagctggacgcatcgcggtcttaaaacgtgttgctggttgggttatttttattcccgccctgatttcaacgctgatctccgtactcaaatttgaggttttccatcgctggctgggaagcgcatttgacgcaggcgtttcggccgagcagctcattgaagcgcgcaccgaatttatcgaccagcttctgcaacgtctctggatcgactacggtttcggacaggtgagcgacgtcgcgctggttgctgttggcggctatggccggggtgaactgcatccgctctctgatatcgacctgctgaattcagcggtgaccctgtctggcatatgcatccagtgatatttttggacgcaattaatgaacatgggatatgtgcatgtaatcgagatatcactattgaggaacttcaaaagatagcccaaggcgtgaatgctgatacactaaaaagttatttagatgggttaaatgcaggctttaagcggtttgaaatcactaagtgtcgagataaaaacgtcatcagtctcggttgcgtacagtccaatccatgattcaaatcggtaatattcagataccagttgggctacagaccaggactcagtgtagtgagtcaatttttgcaactcttgctgacgatcgtaaacaagaaatgctatatatcccgtagtgataaaaagagaaaaaatgataccaaccaggatcctgttcattatgttctccgaagagaccagagattcaaactcctggaggtcttccatatctttgtcttgcgaaaaatagatgtgtaccagcaccgcctgctcaccggcgtcataacggtcaaacaagcgtaaacctctctaaaaagatcagcggggaacgcaggatccctggctccccgtgtggataacagcccaaaaccttattcggtttcttcgctgtcctgcgccgtagattattttcatcggcgtgatacataatcgatgttaaatcatagctgttaagaccaatttctgtaccctcctcatcttggaagtcagacttaatggtcttcagtaagcgtatgcttttacgcaagccaccattagaacgatcacatttactctcaattcgctttatatgtacaaatggggagttataaattcgtttacgctcataattaccgtttcgttgaataaattgtgtgttttatctttcccgaagtgttttatttttatcgaaacgttttgcttgccttgttttgaggcagagtcataaaaatttcattattttggtgcagaataacgctaattaaatggtggattttaatacaattagcaaaatgtaattaacatcgtatattccctgacacatgtcggtgcgttttggctgaaactttcaaagaaaaatccacgatcgtcaccaaatacttttggttcaaaaatcagcacatcagggatatcagttttaattacgttcatgtcttaataacctttaatcatcttcaacaggtattggccataggcattttttttcaatggctcagccagtttcttcacctgctctgcatcaataaacccttttcgatactcattttctctcctgcatcatctgcaaatcttccgtcgtgtttacattcacaaacgccgatttcatgtcgctgaaatcaacggaatgccctccggactggcgcataaataccatgacgcgtcgctctcctgcggccaggtaatcttccagcgcggatattaacgagcgattaatcaatgcgatcgttggatggtcgcgttcaccgtccgcatagctgtcggcggtgatgtagtagatcttctcctgcccttctttcatgcgggagacgtactcttccagcgacacggtctgggcggaggagtcgttgtgcgtagaggcgaagcgcagcagtttagcgatagcttccacgttcgcggtgtcttccgccggaccttctttcagcaccaggccaaactgtttccagaaggtctggtagatggttaaatagatcacacggattaatgaatagaaaaatttacaataatgtaaaaatatttatgattgtcctggcgttaagcctgattacgatccccttttcccgttatatctccccgcgcgctatcgtcaacgaaaatgatgtttatttagcgtggttgcccttaagcgccatgctcgccatcgtattgttatttggacgtcgggattcgacagggccaaaaggagagtgtccgcaacatactggacagtgctccaggtttaatcccttcgggattaaagttgattgaacaacgcccggttgttgagccaggcattgcaggtgatgaaatcaagtccagttcgacgagttcagcatcctcagggtctggtgaaggtcattcacccgaacgacaatcccggcgtcaagtgcatttcatgggtatatccgccatcaataacccagtccggattaatcgcaataccgtgcttctcaaggctcgatttatagcccgccaggcgatcgatagaaacgtgataatcgagcggggcatgcaggcaggcaattttagtgcgaccatgtttgataaatgagtcggttaatatggcgctgtcgtggaaattatccgtgtcgacagaataatcgcaccgagtgcatcaatgcattcgccatttttgtccagaccggccgccaggtccagtggatttttgaaagtcaggcccatgcactgaactggtttttccggcacgttttgatgcaccagcgcggccagaggcgttcctgtaatacggcgtaactgctgaaatgtaaattcatgagcgcgctcaggatcgagctggaaaagggctggaaatggccggacgcagaccgaaatcgaactgatattgtgcggtgacttcgaagttctgggttttgtttgcaataccgccgccatcttggctatcggttgaaccataaggggtcatattgcgggtttcggaatagatagtggccagataaatatcattggcatcatatttcaaaccggttgcccagccttctgcttttttaccttcgcgctactggtgccactggacctcaaggtgttcaaggtaacacaggcgctaccggtgccactggacctcaaggtgttcaaggtaacacgggtgctactggcgctactggtgctactggacctcaaggtgctcaaggtaacacgggtgctactggcgctactggtgccactggacctcaaggtgttcaaggtaacacaggcgctaccggatgttgctataatatccaaaggcgatggattcatttgggttaagcgtaaacattattttgataaaaacctgaatcatcattatttcactaaaacggcataaggtactgaaatgaaagataatactttcgaaaaaaaattagaacttcgagagtggcagaaaatgttcaatcagaccagctctactgagacagaatctgttgttttaatttaaaattttccaccgcccggacaatctgaaaggggacgctgcaactgcctggcagaaaataacgttttcgcggacgggaaaagggcttaaggccgctaacccgacgccatactacgtctctttttatcggctgaccgttggcgggcataaaattgagcagccgggcatgatcggtccaggggaaacccgtgaatggcctgtgttcaggatatcatcttgtggcgatttcggtggctccgcttacaagcttttactctttaattacgcctcgggcgcgcagtaatgcggttttaaaatcctcttcataatctttctgaatgccaggaataacagcatctttagccgagtcacgcattttcaggtggtagatcaggatgtcgtcagaaaggtccgccagttcgccatcaagaaagtgaaatctgtcgtgaagccctgggcggatattgagatttttggggagcgtgtcgatatgagctacgacagttacaataatgcgcagtggcgttagtgatttttcttgccgggtggcgctacgcttacccggcctacaattagcaatcatatcaaaaaattgcacaattcattgtaggcccgtgcgagcatagcgccgccggattagcctggtattaatttttagcgtgattagtgtatgcttgattttgtgatgagggtcacagaacaaagaccccagtaaaataattgacgaggtaaataatcatgaaaattaaaaccactgtagctaccctgagcgtactgtcagtcctgtcattcggtgcgtttgcagccgacaccattaatgccgaacaggcacaatcccgtcatatatgtgtcaacctttggtttttggtggtgtaaatcaaggctttatattgctggatttgtgagtcatttagcggaaaggcgaagaggaaacagagtgtcaaggcgggacgttaaacggagttaaggcataaaacatgcgtctctatacaaagcattactttttgagcgtccaacgtagcagactatcaagaccaaaggagagatagaaaaaactgaattcgacgtaattctgaaagctgctggcgcgaacaaagttgctgtaatcaaagcagtacgtggcgcaactggcctgggtctgaaagaagctaaagacctggtagaatctgctccagctgcgctgaaagaaggcgtgagcaaagacgacgcagaagcactgaaaaaatctctggaagaagctggcgctgaagttgtagagtgttttcttagcccgcaggctttgacttagataaaactgagacattactgcttgaggcactaatataaggttcggcagagaagcggtattcaacgacaacgtgtttactcaggacttctttactgaaaatgccacacataaacagaactgtacctcgtttgacccaaaacgtgttatcacacacaacgtttaatatggcaaaactgataatccgttaaaaatgcagtatcctgaccgcttacgtcataagtgatttttgacgtgccgtcgttgtttaaaacattctttttatatctttcagagaaaacgacgacgccgacattttttgccgcgcctgcggcggtatcatcacttttgaaaacctgattttgtcctggccagaaacccgactgcggcgaaaagctaaagaagcgggcgcagagatcggcccgggcggcgcctgggcgcaccatatccccccctgcacgaccaccgaggcacaagccgagggcatcaatggcaatggatttacctgcaccggtttcaccggtaatcgccgtcattccgctatggaagtcgatctcaagctcacgaacaatggcaaagttgctgatggtcagttgtgccagcataaagggctattgtaatcaacagggaaagacgataatcgtcccataaggagctcacttgattacacatattagcccgcttggctctatggatatgttgtcgcaactggaagtggacatgcttaaacgcaccgccagtagcgacctttatcaactgtttcgtaactgttcacttgccgtactgaactccggaagcctgaccgacaacagttggaatgaccatctgggtgggactcaggcctattacaataaagggaaagcgctgccactgatgctgcgtttctgctgggactcggtcatcgataaaaagagttatgaaaccctcatattcttcaggaaaggaacccgggagcagatgaccacaccttatacagacagccgctgggacgaaacctactatcgttcaaccatgattatcagctttcattgaaactttctcaagtttttctgcttcaagttgttctttaagagtatcaacttcctgcttcaacataccgtggtcaaattgaagatttttaactttaaagtcaacttcttgtattgattgaatagaaattgcaaccgagctataaagtgttacagcgtctttctgtggtgtggtgaatacatcgtcagtgacacaaaatatctaccagaagggttccgtctaactgtagcatttacaatacgcccctctacttcgcgacttttggcaaatcgaacaaggcctagtttcggcaactttattttgttccctacaacggcaatgttttcatttgtttgttttgtggtataagattgtacgttgttcttcttagatttaaagagcgcatgacggagtcaaagtccgttgccttaccgcttggctatagcccatcgaaataattatcttcttttcaaagacaaatgttattgtaccataatgtccaataaaaaacaactgctatatagcagaagttaaaatggcggtcccgaccggggtcgaaccggcgatctcctgcgtgacaggcagtctatggagaattgataagcgctgcttatcaatataagtttccgtgtttcgttttcgtttagttttgagagttcaattcagtgttgactcttaaatgaggatatgatataaataaatcctgcaatttgtatgggcctatagctcagctggttagagcgcacgcctgataagcgtgaggtcgataaggaacatttgtgcaaatgattattttaaacttacaggtgaatatccgccacaaaagttattaacaattgaaaataaaacgcaaatagagcaggagcagcaatagctggtctttttttattgctaaaaaagaccaactatgagaagtcaagaggaattttataaataggaaattaaaaaatcttagtggctgcaacctcagctgctgtcacttttgacatggcatcccacatgctatttaccccattcgcaccttctttaaaaagaatagttgcaccacgtacagcatccgatccaaataacgtttctaaagccatactacgttgctggtctgttaaatctttcatcgattcatgaagggactcctagtgtcaaggcatccaccgtgcgccctttctaacttaaccaaactaaaattaaaaaatatgagctacactgttatctagttttcaaagaacataccatttgctatttaaaatagctttttggtggagcctagcgggatcgaaccgctgacctcctgcgtgcaaggcaggcgctctttctttattggaaatgagttgctttcacttttagaaaatgcagggcgtatgggagtacctttgccttcagctttaacaaatgcagttgaaattttgggtggaaaacaaaaacaagaagagaaaaagaccaactatgagaagtcaagaggaattttataaataggaaattaaaaaaggggtataaacaccatcatatcgataacgaaatggatatctggcattatttaaggttaaaccaaaaatatcgtgaacaagatcattcaaataatggtaatcagaattcaaatgagattgaagttccagcagaaaacattatctaataagggggaagatgatggcgaatgaagcgcatgacggagtcaaagtccgttgccttaccgcttggctatagcccattaatatttactagtatggttatcttttcaaaaaaataaaccctctcaggttattttaaagaaaatggtggaggggggcagattcgaactgccgaacccgaaggagcggatttacagccggattgtggctccggcattcgtgggttcgattcccatcagtcgccccatttttattttaaaaattacaaataatctaatggatacttacatataattaagtaagaattcgatgggctatagccaagcggtaaggcaacggactttgactccgtcatgcgctccaaataccaagtaatgaaagatgatgtcgttcaaaagatgaaagaaacttggtccggtataacgaaatggtgggaagaaaccaaaacttcagccgacaacaaggtagaagaaataaaaaatacagtttcaagaaaatttgaagagcagaaaaaagctgttaactaatagatcgaggacttaaccatataatatgtagcaatgttatctagttttgagagaatataaaaaacttgttgactttaaaatttaaataagttaaaatgattcttgtcttaaatgaatacagtctggtaatgatggcagagaggtcacacccgtctaatagatcgaggacttaaccatataatatgaagcaatgttatctagttttgaaagaatataaaaaacttgttgactttcaaaagtgaatgagttacaataattcttgtcttaaatgaatacagtctggtaatgatggcagagaggtcacacccgtgcgctactggtgccactggacctcaaggtgttcaaggtaacacaggcgctaccggcgctactggtgctactggacctcaaggtgttcaaggtaacacaggcgctactggtgccactggacctcaaggtgttcaaggtaacacaggcgctaccgacatgcctgcctgtcacgcaggagatcgccggttcgaccccggtcgggaccgccacttttgtttataccaccattagtggttttatatatagttttggctcggtagctcagtcggtagagcagaggactgaaaatcctcgtgtcggcggctgaaccgtctacattttatggagaaatcagaagatactctttcactttcaaagtccccacaaactatattccgcaacaacacgcattgattgttaaagtttgttctggaaatgctgacatgagacaagggacagcgatttgtgtaagttttacgcataagatatgcttgttcttctgttggatacaaacggaatttatatgctttatcatatcattttacctcacttttcaccttgattttgggtgtttttgcccatccccccgaaaagggggaataaggacaacaatactttatccttactatataacccacctgtcgcatcatccaaacctttttcaagaccttctatgatggatttaccaatggaacgtagatttatagtgctaaagaatttttcaactgtattccacttatcttcaatatcgctctttatctcccgcacaattctaataagattcgtatcaatgccttttgcagttaaccatttcaccattgtctcggcattaatggctacctttgaaacatcaatttctaatttttccgatgaaaagttaatagctgcgatgatattcccttttttaacttgacgggtgagttctgccacgcaagtaggaggtgggaccgtggtcccagtttaatccggtgtgtggaatcgatattcccagtggggtttgacgggtgagttctgccacgcaagtaggaggtgggaccgtggtcccagtttaatctcattcgccatcatcttcccccttattagataatgttttctgctggaacttcaatttcatttgaattctgatttccactatttgaaggatcttgttcacgatatttttggtttagccttaaataatgccagatatccatttctaagggggagcaaaagctctctcttttttattaacgaggaggaaaagccatgaaattaacactattaatcaaggaagaaaagaaaatttttcatttaccggagtttattccagcacgtttaattcgtcaagcacctgaactttttttgttccccattcgtcttggaataggaaatctagcattttaacagttacaccgtctttatcaatggttatcttatcaccgtcaattctaataagattcgtatcaatgccttttgcagttaaccatttcaccattgactggacctcaaggtaacacgggcgctactggcgctaccggtgccactgggcctcgaggtaacacgggcgccactggtgccactggacctcaaggtaacacgggcgctactggcgctaccggtgccactgggcctcctgataacacagactcattaaaattcaatgatgttccagcaaatcactggtctacgaaagcaatttatgatttaacaaaccgtaaagtagtgcaagggtacggaaataatatctttggctttggtgacaatgtaacagctggttagagcagacggctcataaccgtccggtcgtaggttcgagtcctacaaggtccaccattagacgtatatatctcggaggtatacccaagttcggctgaagggatcggtcttgaaaaccgacaggcgaggaaatgaagcggtagagcatactgcaagggcaggagcagcaacagtacaacgagatgtaaatgtacaaaataatgtaagaggaaatgaagcggtagagcatactgcaagggcaggagcagcaacagtacatatttgctggaggtgtcgtatttccttgacctcctccgttatttgctggaggtgttgtatttccttgacctcctccattatttgctggaggtgtcgtatttccttgacctcctccgttatttgctggaggtgacgggaccaacgggagatacgggaccaacgggactaaccggagtaacaggaccaaccggagtaacgggaccaacaggagtaacgggaccaaccggagtaacaggaccaaccggagatacgggaccaatcgcctgccttacaagcagggggtcggcggttcgatcccgtcatcctccaccatataaattttatatgaatagtattatcgcggggtggagcagcacggtagctcgtcgggctcataacccgaaggtcgcagctgcgaccttcgggttatgagcccgacgagctaccgtgctgctccaccccgcgatgataaaatattcactttagaaaaaatggaggaggtagagggattcgaacccccgcgcgactctcgccgcctgtcccaagaaatacccgcaaaagccaccgaaagtggcaataaaggtttttaataatacctcaatacgacccatcttttcatctcctcgtatgattaagttaggtttttagggacgggatgtacctataaatccacgaatgccggagccacaatccggtgcgttaaccacttcgccacaaccgccatgttgtgtaaatatatttggcaggggcagtaggaatcgaacccacactggaggttttggagacctcagttctacctttttttcatgttttgacaagttgcggtgagataagcctgcatttggacagacttcagcccctaaatcgagcatatcgatagccatgtagttctttggcgtccgcaaagcttcgctctatagttgaacttctcttcctgtatttcttagtttgttttgtaattcgatttctcgttctgctgtctgtctttcgcctttcacattgccttgctgtccttcttctcttcctgtatttcttagtttgttttgtaattcagaatgtatgcccacaagatttagttgatacgtataaccaaagtcagaatgtatacacacaagatttaattgatacgtataaccaaagtcagaatgtatgcccacaagatttagttgatacgtacagaggactgaaaatcctcgtgtcggcggttcgattccgtcccgagccaccatttattttaataaaatacgccggcttagctcaattggtagagcaactgacttgtaatcagtaggttgggggttgaccttcgggttatgagcccgacgagctaccgtgctgctccaccccgcgacaatactattcatataaaattatatggtggaggatgacgggatcgaaccgccgaccccctgcttgtaaggcaggctaccggttccactggacttactggctccactgggactaccgggactactgggactaccggggctaccggttccactggacctactgggactaccggttccactggagctaccggggctactggcgttggtcccgtatctccgattggtcccgtatctccggttggtcctgttactccgatcggtcctgttactccggttggtcctgttactccggttagtcccgttactcctgttggtcccgtatctcccgaaggagcggatttacagtccgccgcgtttagccacttcgctacccctccgaaacttacatggtgccggctagaggacttgaacccccaacctactgattacaagtcagttgctctacgacttttgacctgctataacaggtctttttttgcatctcgtacgcaacatgtgttatgatgacatcacatgtgtttctattagatcaccagccccaactggtggtttctctttatcattctagaggactgaaaatcctcgtgtcggcggttcgattccgtcccgagccaccattttgaaatcacgagccgacttagctcaattggtagagcaactgacttgtaatcagtaggttgggggtagcaactgacttgtaatcagtaggttgggggttcaagtcctctagtcggcaccagtttttattgtaagagccattagctcagttggtagagcatctgacttttaatcagagggtcgaagaactctcgaccagagcttggaaggctcttgttttaccactaaactacacccgcattaaattgtaaatggtgagccatgaaggactcgaaccttcgaccctctgattaaaagtcagatgccttcgaccctctgattaaaagtcagatgctctaccaactgagctaatggctcattttgaaagtggtgccgactagaggacttgaacccccaacctactgattacaagtcagttgctcgaggcggaacgggaacagacaacggaaccggaggaaacccaggaggcggaacggggaaagataacggaaccggaggaaacccaggaggcggaacgggaacagacaacggaaccggagccgccgacacgaggattttcagtcctctgctctaccgactgagctaccgagcctttatgtaaaaaatggcggtcccgaccggggtcgaaccggcgatctcctgcgtgacaggcaggcaaaatggaataggtaaaggagcattacacatgttaacaaaaatgaagaattggttaaaaaacgaagactcacaattatcatcagaaaacggtatgttaatcgcgttagcggtgattacctgccttacaagcagggggtcggcggttcgatcccgtcatcctccaccatatatatttaaaatgtcggaggggtagcgaagtggctaaacgcggcggactgtaaatccgctccttccagaagtgaagccagacccaaaaccagaagaaaaaccagaagtgaagccagatccaaaacctgaagaaaaaccagaagtgaagccagacccaaaaccagaagaaaaaccagaagtgaagcaactgacttgtaatcagtaggttgggggttcaagtcctctagtcggcaccagaaatcatggcggttgtggcgaagtggttaacgcaccggattgtggctccggcattcgtgagcgcatgacggagtcaaagtccgttgccttaccgcttggctatagcccattaattaagaatggtggaggggggcagattcgaactgccgaacccgaaggagcggatttacagtaaaacaagagccttccaagctctggtcgagagttcgattctcttcacccgctttttaattatgggcctatagctcagctggttagagcgcacgcctgataagcgtgaggtcgatccaggaactggagaagaaacaaacccaaacgcgtagagggaggggggctaacgtttagtgagtttatggacgagctctacctctctttattacgtcaggggtataaacaccatccgctgacctcctgcgtgcaaggcaggcgctctcccagctgagctaaggccccaaacaagtatcgggaagacaggatttgaacctgcgaccccctggtcccaaaccaggtgctctctacttcttctagctcttctgtttctgtaattacttctacttcttctgactcttccgcttccgcaattacttctacttcttctagctcttctgtttctgtaattacttctactctgtaaatccgctccttcgggttcggcagttcgaatctgcccccctccaccatttacataggggcatagtttaaaggtagaactgaggtctccaaaacctccagtgtgggttccgctgacctcctgcgtgcaaggcaggcgctctcccagctgagctaaggccccaaaatgtatggtgggcctaaatggactcgaaccatcgacctcacgcttatcaggcgtgcgcgcgccgatggtagttgggaccttgtccctgtgagagtaggacgttgccaggcaatccggaggattagctcagctgggagagcacctgccttacaagcagggggtcggcggttagcacctgccttacaagcagggggtcggcggttcgatcccgtcatcctccaccatttagccgacttagctcaattggtagagcaactgacttgtaatcagtaggttgggggtcgaccgatcggttaacagccgatagctctaccactgagctactgcggaataatattagcctggcaacgtcctactctcacagggacaaggtcccaactaccatcggcgctagcaacggactttgactccgtcatgcgctggttcgaatccagctagcccagccatttacgagccattagctcagttggtagagcatctgacttttaatcagagggtcgaaggttcaggcaaagtaacagatggtttacatgcattaaatagcaatgcaggtattgggaaactagtagatggatcaggcaaagtaacagatggtttacatgcattaaatagcaatgcccgccgacacgaggattttcagtcctctgctctaccgactgagctaccgagccttattaaaatggcggtcccgaccggggtcgaaccggcgatctcctgcgtgacaggcagtttcaattaatggaaaaccgtagagtttctatccttaagttgatgggcatgtgttagtaccccatccctatcaagctaatagttttaattaccccataacgaaatttttaggttaacctagattagtgctatttaatcaattctaaatctacccttatgggcgcacgtataaatgctaacttaaatatgtacattaacgcttgaataaatatgtacattttccttctactttcttctgttcttctgctttcttctgttcttctactttcttctgttcctctgctttcttctgttcttctactttcttctgttcttcggctttcttctgttcttcaacgtatttatatcaaaaaatagatgagtcgaaattaaaagcctatacccgttaccaattaagagggtatatcgaagatagtcaagacttagaaatctatttaattcgcttgaagatttttaactttaaagtcaacttcttgtattgcttgaatagaaattgcaaacgagctataaagtgttacagcgtctttctgtggtgtggtgaatacatcgtcagagtggaccttgaattccttgcgggccttggattccttggggaccttgaattccttggagacctgtcgctccggttgctcctgtagctcccgttggaccttgaattccttgcggaccgccgaccccctgcttgtaaggcaggtgctctcccagctgagctaatcctccatttgcctggcaacgtcctactctcacagggacaaggtcccaactaccatcggcgctgccagcggaatgctttcatcctaaaccaaaagtaaacagtgtcttaataaaacttacccgccataccacagatgttccagataaatattggaagctatatacgtactttgttttctttttttatttggtatatgctttacttgtaatcgaaaataaagcactaatagggtgtttttgcccatcccctcgaaaagggggaataagaaaaaataggatgttttgaaaatgtacatatttattcaagcgttaatgtacatatttaagttagcatttatacttttgtattatacacctaaataatcttaataatgagaatattaattatcaatttaaaataaaaattgacgtttcacgttgtttgtttcgttcagttttcaaagaactaatggtggagcctagcgggatcgaaccgctgacctcctgcgtgcaaggcaggcgctctgtctaatacctgatgtgtatccctgaacagtgttctcagttttattctcttgttgggtgtttttgcccatcccctcgaaaagggggaataagaaaaaataggatgttttcgcgctcttcgggagtggttgtaggagattcttttcctgttttagggcaaacactcatgcccatcaacttaagaatttgcactacccccaagtgtcaaaaaacgttattcgcaacggactttgactccgtcatgcgctggttcgaatccagctagcccagccattaagagccattagctcagttggtagagcatctgacttttaatcagagggtcgaaggattttgtacatgcttaaacaagcgaaaatgtacatgtttatcttgacatttacacaaaagcacgttctattgtagaacgcgcttttcctgaatgagtctatactaataattctcccgattggactttcaccaactagataatgtgtccttatctggacacgccgatctgccagcggagggagtaaaaatcatggatttgttccatcggaaccacttctttaacagcggtacaggcaaatcaattttcttttgcactaaatggtacaccaattgttcttgtaatcgctcctaagtcaccgactgttcgtaagtctaggtgcataaaactaccggttccactggagctaccggggctactggagctaccggacctactggacctaccggttccactggagctaccggggctactggagctaccggacctactggacccctgccttacaagcagggggtcggcggttcgatcccgtcatcctccaccatatatgtcggaggggtagcgaagtggctaaacgcggcggactgtaaatccgctccttccaaattttggggtcaaagataaaaaggtccactggacctttgttttcgcttttcaaattttggggtcaaagataaaaaggtccactggacctttgttttcgcttttcaaaaacaagagccttccaagctctggtcgagagttcgattctcttcacccgcttttagttctttgaaaactgaacgaaacaaacaacgtgaaacgtcaatttttattttgggctactggctctaccggacctgctggacctaccggggctactggctctactggttccactggacctactgggactaccggttccactggagctaccggggctactgcgtatatagcttccaatatttatctggaacatctgtggtatggcggggaaggtttattaagacactgtttacttttggtttaggatgaaagcattccgctggcagctttcaattaatggaaaaccgtagagtttctatccttaagttgatgggcatggggcaaacactggaatcttaccagtcccttgatgaaatgtttgattaattcttgccaacggactttgactccgtcatgcgctggttcgaatccagctagcccagccatttttgcggaagtagttcagtggtagaatacaaccttgccaaggttggggtcgatctcccgttggtcccgtatctccgattggtcccgtatctccggttggtcctgtttctccggttggtcccgttactccggttagtcccgttggtcccgtatctccataagccaatgactcctgataagccaatggaaaaggaagacatgaagcctgataagccaatgactcctgataagccaatggaaaaggaagacatgaagcctgataatagtttgccaatgatgaatttgaaatagagatttccacgttttaaatatgatttgtcgggtaaaagactggcgcggtatcagttgtgatccgtttccagcctctccttaaataatgccagatatccatttcgttatcgatatgatggtgtttataccccatgcccatcaacttaaggatagaaactctacggttttccattaattgaacgcggaggaaatcacatggatgttgcaaaacagttttcttcttatcttaaacaagagaataaaactgagaacactgttcagggatacacatcaggtattagacaagctgccagcggaatgctttcatcctaaacaaaaagaaaacagtgtctaaaaaaaccttccccgccataccacagatgttccagataaatattggaagctatatagctgccagcggaatgctttcatcctaaacaaaaagaaaacagtgtcttaaaaaaccttccccgccataccacagatgttccagataaatattggaagctatatagctgccagcggaatgctttcatcctaaacaaaaagaaaacagtgtctaaaaaaaacttccccgccataccacagatgttccagataaatattggaagctatatagctgccagcggaatgctttcatcctaaacaaaaagaaaacagtgtcttaaaaaaacttccccgccataccacagatgttccagataaatattggaagctatatgtgcggctggatcacctcctttctatggagaattgatgaacgctgttcatcaatataagtttccgtgtttcgttttgttcagttttgagagaactatctctcatattagtatagactcattcaggaaaagcgcgttctacaatagaacgtgcttttgtattatacacctaaataatcttaataatgagaatattaattatcaatttgccagcggaatgctttcatcctaaaccaaaagtaaacagtgtcttaataaaacttccccgccataccacagatgttccagataaatattggaagctatatacgtcagaaccgctaattccttcccttgcttcgctccacggtttgcgatccctagcgcccccgccacggcttcgctcactttagaagctaaattatattggtcatcaacgtatttatatcaaaaaatagatgagtcgaaattaaaagcctatacccgttatcaattaagagggtatatcgaagatagtcaagacttagaaatctatgttccactggacctactgggactaccggttccactggagctaccggggctactggctctaccggacctgctggacctaccggggctactggctctactgggcaagaattaatcaaacatttcatcaagggactggtaagattccagtgtttgccctaaaacaggaaaagaatctcctacaaccactcccgaagagcgcgaaaaaaaaaaaaaaaaaaaaaaaaaaaaaaaaaaaaaaaaacaaaaaaaaaaaaaaaaaaaaaaaaaaaaaaaaaaaaaaaaacaaaaaaaaaaaaaatgaccaatataatttagcttctaaagtgagcgaagccgtggcgggtgcgctagggatcgcaaaccgtggagcgaagcaagggaaggaattagcggccgctaattccttcccttgcttcgctccacggtttgcgatacctagcgcacccgccacggcttcgctcactttagaagctaaattatattggtcatatgaccaatataatttagcttctaaagtgagcgaagccgtggcgggggcgctaggtatcgcaaaccgtggagcgaagcaagggaaggaattagcggtggaccttgaattccttgcgggccttggattccttggggaccttgaattccttggggacctgtcgctccggttgctcctgtagctcccgttggacgaggaaatgaagcggtagagcatactgcaagggcaggagcagcaacagtacaacgtgatgtaaatgtacaaaacaatgtaagaggaagtgaagcgagctttatggttagcttcttcctgagctttacgttgagtctcttcttgagctttatggttagcttcttcctgagctttacgttgagtctcttcttcgggaccaacgggactaaccggagtaacaggaccaatcggagatacgggaccaacaggagtaacgggactaaccggagtaacaggaccaaccggattacatcgttatttaccgcttcacttcctcttacattgttttgtacatttacatctcgctgtactgttgctgctcctgcccttgcagtatgctctaaaacgaaacacggaaacttatattgataagcagcgcttatcaattctccatagaaaggaggtgatccagccgcaccttccgatacggctacctctgttccttcacctggtttttctgttccttcacctggcttttctgttccttcacctggtttttctgttccttcacctggtttttctgttccttccttaaataatgccagatatccatttcgttatcgatatgatggtgtttatacccctgacgtaataaagagaggtagagctcgtccataaactccctcttctttaggctttactatttcttgcgcttttacttcttctttgacttttgcctcttctttaggctttactatttcttgcgcttttactttggtcctgttactccggttagtcccgttggtcccgtatctcccgttggtcccgtatctccgattggtcccgtatctccggttggtcctgtttctgccatcatcaccaaactattgaaggcatattccttcaaaactagataacattgcttcatattatatggttaagtcctcgatctattagcccatctagcgttttatcgtcttggtcaccttggtttttcccatctagcgttttatcgtcttggtcaccttggtttttcccatctagcgagtaacaggaccaaccggagatacgggaccaatcggagatacgggaccaacgggactaaccggagtaacaggaccaatcggagatacggtcggaggggtagcgaagtggctaaacgcggcggactgtaaatccgctccttcgggttcggcagttcgaatctgcccccctccaccattttccgtgttcggtatgggaacgggtgtgacctctctgccatcatcaccaaactattgaaggcatattccttcaaaactagataacatttgtggagctgacgaatactaatagatcgaggacttaaccatataatatgtagcaaatgttatctagttttgaaggaatatgccttcaaaaaagaaaatgtaggaaatatagtgtcgccgcaagtgaaaaaagaaaatgtaggaaatatagtgtcgccgcaagtgaaaaaagaaactccggttggtcccgttactccggttagtcccgttggtcccgtatctccgattggtcctgttactccggttagtcccgttggtcccgaagagctcctatgttctcttggatacatcgtagtgctgaatttaataatataattccttcatcacaaattacacaaatacctttaacttagcgtggtttttttccgaaatgctggcggtaccccatgcccatcaacttaaggatagaaactctacggttttccattaattgagtagcacactacagtttactgcgtaaacccgtgtgcccttcgggacatttcggctaccgccgagccataacaagcatggcaaaagtagcacactacagtttactgcgtaaacccgtgtgcccttcgggacatttcggctcccgccgagccataacaagcatggcaaaagtagcacactacagtttactgcgtaaacacgtgtgcccttcgggacatttcggctcccgccgagccataacaagcatggcaaaaggggtataaacaccatcatatcgataacgaaatggatatctggcattatttaaggctaaaccaaaaatatcgtgaacaagatccaattaattacggtatgattgcggaggactctgacgatgtattcaccacaccacagaaagacgctgtaacactttatagctcgcaacctctattaaaatagcgggagcatttgtcccattcagacccgctaattccttcccttgcttcgctccacggtttgcgatagccgaaatgtcccgaagggcacacgggtttacgcagtaaactgtagtgtgctactgtttacatggaactacccccgaaaaatctatggagaattgataagcgctgcttatcaatataagtttccgtgtttcgttttgttcagttttgagagaactatctctcagtgggtttgggcaaagcccatgattttttttgccatgcttgttatggctcggcgggagccgaaatgtcccgaagggcacacggtgtttattatcgtaaagctaaaaatgctgaagagtttccgcgtattacgttttttgaactagacaatagaccagatggattttattaagacactgtttacttttggtttaggatgaaagcattccgctggcagcttaagcaattgctgaatcgagacttgaaataggaaataagaaattgccagatccaatgggaaaaatgaagcttgtgaaagtagacataagtgataaaaataaaaaaatggctgggctagctggattcgaaccagcgcatgacggagtcaaagtccgttgccttaccgcttggctatagcccatgtgacatgtggagctgacgaatactaatagatcgaggacttaaccatataatatgaagcaatgttatctagttttgaacttaaccatataatatgtagcaaatgttatctagttttgaaggaatatgccttcaatagtttggtgatgatggcagacttaaccatataatatgtagcaaatgttatctagttttgaaggaatatgccttcatagtttggtgatgatggcagagaacgggccaattactaatacgataatcaccgctaacgcgattaacataccgttttctgatgataattgtgagtcttcgttccactggacctactgggactaccggttccactggagctaccggggctactggagctaccggacctactggaccacttccgtgttcggtatgggaacgggtgtgacctctctgccatcattaccagactgtattcatttaagacaagaatgtgaaggaacagagaagccgggtgaaggaacagagaagccgggtgaaggaacagagaagccgggtgaaggaacagaaccagaagtgaagccagacccaaaaccagaagaaaaaccagaagtgaagccagacccaaaaccagaagaaaaactagaagaacagaagaaagcagaagaacagaagaaagtagaagaacagaagaaagccgaagaacagaagaaagtagaacctgagactaagccagaggtgaagccagaggaaaaacctgagactaagccagaggtgaagccagaggaaaaactttgatctttcggatgtaaccaaaattctgtagctatagtgccacgttgtaacataggtgcagcacaccataaatgacccgtacgggattcgaacccgtgttaccgccgtgaaagggcggtgtcttaaccacttgaccaacgggccaaagcggaagacgggattcgaacccgcgaccccaaccttggcaaggttgtattctaccactgaactacttccgcaatatttgctggaggtgtcgtatttccttgacctcctccgttatttgctggaggtgtcgtatttccttgacctctatggctgctctggtttctcatttattaattgttgtactaatacctttaattcataaatttcagctttcattcacctccagcaaataacggaggaggtcaaggaaatacgacacctccagcaaataacggaggaggtcaaggaacttaagttgatgggcatggggtaccgccagcatttcggaaaaaaaccacgctaaggattttttctataaaaattttaactctgattttcttagcgtggtttttttccgaaatgctggcggtaccccatgcccatcaacttaagagaaaagagaaggaatagaagaagtaacggaagaagaaaaagcgaaagccaaggcaaaagcggcggcgttattgtcccattcagacccgctaattccttcccttgcttcgctccacggtttgcgatccctagcgcacccgcaaggaacagaaaagccaggtgaaggaacagaaaaaccaggtgaaggaacagaaaaaccaggtgaaggaattccttcacctggtttttctgttccttcacctggtttttctgttccttcacctggtttttctgttcctttaatcaccgctaacgcgattaacataccgttttctgatgataattgtgagtcttcattttttaaccaacacaagatttagttgatacgtataaccaaagtcagaatgtatgcccacaagatttagttgatacgtaacgggaccaacgggagatacgggaccaacgggactaaccggagtaacaggaccaatcggagatacggtgaagccagaggaaaaacctgagactaagccagaagtgaagccagaggaaaaacctgagactaagccatacgtataatcaaagtcagaatgtatgcccacaagatttagttgatacgtataaccaaagtcagaatacgtataaccaaagtcagaatgtatgcccacaagatttagttgatacgtataaccaaagtcagaatacgtataaccaaagtcagaatgtatgcccacaagatttagttgatacgtataatcaaagtcagattgtcccattcagacccgctaattccttcccttgcttcgctccacggtttgcgatacctagcgccaattggtagagcaactgacttgtaatcagtaggttgggggttcaagtcctctagtcggcaccagcgctagggatcgcaaaccgtggagcgaagcaagggaaggaattagcggttctgaatgggacaaccaaaaccagaagaaaaaccagaagtgaagccagacccaaaaccagaagaaaaaccagaagtgacctagcgcacccgccacggcttcgctcactttagaagctaaattatattggtcataataccaaacctagcgcccccgccacggcttcgctcactttagaagctaaattatattggtcataataccaaatttatatatgagagatagttctctcaaaactgaacaaaacgaaacacggaaacttatattgatatgtaggaaatatagtgtcaccacaagtgaagaaagagaatgtaggaaatatagtgtcaccacgaagaaaaaccagaagtgaagccagacccaaaaccagaagaaaaaccagaagtgaagccagaaagggacagaagaagtaacggaagaagaaaaagcgaaagccaaggcaaaagcggcggcgttagcattgtagcgaattaaatagatttctaagtcttgactatcttcgatataccctcttaattgccaggtgaaggaacagaaaaaccaggtgaaggaacagaaaaaccaggtgaaggaacagaaaatgcatttgcttgtccgatggggtgtattttagagtatgcgacaacggatcgtgaaggatatctttttttagacactgttttctttttgtttaggatgaaagcattccgctggcagcttaagcaagttggtcccgtatctccgattggtcctgttactccggttagtcccgttggtcccgtatctccttttttaagacactgttttctttttgtttaggatgaaagcattccgctggcagcttaagcaatcagaaccgctaattccttcccttgcttcgctccacggtttgcgatccctagcgcacccgcccaatcggagatacgggaccaacgggactaaccggagtaacgggaccaaccggagaaacaggcgggtgcgctaggtatcgcaaaccgtggagcgaagcaagggaaggaattagcgggtctgagcgggggcgctaggtatcgcaaaccgtggagcgaagcaagggaaggaattagcgggtctgagcgggggcgctaggtatcgcaaaccgtggagcgaagcaagggaaggaattagcggttctgaccaacgggagatacgggaccaacgggactaaccggagtaacgggaccaaccggagaaacagacttgaacccccaacctactgattacaagtcagttgctctaccaattgagctaagtcggctgcgggtgcgctaggtatcgcaaaccgtggagcgaagcaagggaaggaattagcggttctgactgttactccggttggtcccgttactccggttagtcccgttggtcccgtatctccgattggctgggtttcctccggttccgttgtctgttcccgttccgcctcctgggtttcctccggttcaagttttattaagacactgtttacttttggtttaggatgaaagcattccgctggcagctattaatgggctatagccaagcggtaaggcaacggactttgactccgtcatgcgctggttttcgatgggctatagccaagcggtaaggcaacggactttgactccgtcatgcgctggttaaaccttccccgccataccacagatgttccagataaatattggaagctatatacgtactaaaacttccccgccataccacagatgttccagataaatattggaagctatatacgtactacaaagtacgtatatagcttccaatatttatctggaacatctgtggtatggcggggaagcccgaaggagcggatttacagtccgccgcgtttagccacttcgctacccctccgacatagaagaagaagaagaagaagaagaagaagaagaagaagaagaagaagaagaagaagaaatttcattcgccatcatcttcccccttattagataatgttttctgctggaacttcaatagcacctgccttacaagcagggggtcggcggttcgatcccgtcatcctccaccatatacgttgtactgttgctgctcctgcccttgcagtatgctctaccgcttcatttcctcttaaaccttcgaccctctgattaaaagtcagatgctctaccaactgagctaatggctcttacgtatatagcttccaatatttatctggaacatctgtggtatggcggggaaggttttttttatacgtatcaactaaatcttgtgggcatacattctgactttggttatacgtatcaacgtatatagcttccaatatttatctggaacatctgtggtatggcggggaagtttttttatctcccgttggtcccgtatctccgattggtcccgtatctccggttggtcctgttactcggagtaacaggaccaaccggagatacgggaccaatcggagatacgggaccaacgggaaaggctcggtagctcagtcggtagagcagaggactgaaaatcctcgtgtcggcggttaccgctgacctcctgcgtgcaaggcaggcgctctcccagctgagctaaggccccaaagtagagcacctggtttgggaccagggggtcgcaggttcaaatcctgtcttcccgatactttacggttagcttcttcctgagctttacggttagcttcttcctgagctttacggtcgccgcctgtcggttttcaagaccgatcccttcagccgaacttgggtatacctccgattaaaatggcggtcccgaccggggtcgaaccggcgatctcctgcgtgacaggcaggcgagagcgcctgccttgcacgcaggaggtcagcggttcgatcccgctaggctccaccaacacctccagcaaataacggaggaggtcaaggaaatacgacacctccagcaaataaaaaaaaaaaaaaaaaaaaaaaaaaaaaaaaaaaaaaaaaaaaaaaaaaaaaaaaaacccccccccccccccccccccccccccccccccccccccccccccccccccccccccctgcgaccttcgggttatgagcccgacgagctaccgtgctgctccaccccgcgattgcctgcctgtcacgcaggagatcgccggttcgaccccggtcgggaccgccattttgcaacggactttgactccgtcatgcgctggttcgaatccagctagcccagccatttttatatggtggaggatgacgggatcgaaccgccgaccccctgcttgtaaggcaggtactgtaaatccgctccttcgggttcggcagttcgaatctgcccccctccaccatttgacattcccatctcctgaaaaataatagataaatttcggatgtctttacgtgttaactggtgccgactagaggacttgaacccccaacctactgattacaagtcagttgctctaaaataaaaattgacgtttcacgttgtttgtttcgttcagttttcaaagaactaaacctgccttacaagcagggggtcggcggttcgatcccgtcatcctccaccatatatttatcaggcttcatgtcttccttttccattggcttatcaggagtcattggcttatc
